(19) United States
(12) Patent Application Publication
(10) Pub. No.: US 2007/0161091 A1
(43) Pub. Date: Jul. 12, 2007

(54) Corynebacterium glutamicum genes encoding proteins involved in genetic stability, gene expression, and protein secretion and folding

(75) Inventors: Markus Pompejus, Freinsheim (DE); Burkhard Kroger, Limburgerhof (DE); Hartwig Schroder, Nussloch (DE); Oskar Zelder, Speyer (DE); Gregor Haberhauer, Limburgerhof (DE)

Correspondence Address: LAHIVE & COCKFIELD, LLP, ONE POST OFFICE SQUARE, BOSTON, MA, 02109-2127, US

(73) Assignee: BASF Aktiengesellschaft, Ludwigshafen (DE)

(21) Appl. No.: 11/041,504

(22) Filed: Jan. 21, 2005

Related U.S. Application Data
(63) Continuation of application No. 09/602,839, filed on Jun. 23, 2000, now abandoned.
(60) Provisional application No. 60/143,752, filed on Jul. 14, 1999.
(60) Provisional application No. 60/141,031, filed on Jun. 25, 1999.
(60) Provisional application No. 60/151,671, filed on Aug. 31, 1999.

(30) Foreign Application Priority Data
Jul. 8, 1999 (DE) 19931412.8
Jul. 14, 1999 (DE) 19932928.1

(51) Int. Cl. C12P 13/04; C07H 21/04; C12P 21/06; C12N 9/10; C12N 1/21

(52) U.S. Cl. 435/106; 435/69.1; 435/193; 435/320.1; 435/252.3; 536/23.2

(57) ABSTRACT

Isolated nucleic acid molecules, designated SES nucleic acid molecules, which encode novel SES proteins from Corynebacterium glutamicum are described. The invention also provides antisense nucleic acid molecules, recombinant expression vectors containing SES nucleic acid molecules, and host cells into which the expression vectors have been introduced. The invention still further provides isolated SES proteins, mutated SES proteins, fusion proteins, antigenic peptides and methods for the improvement of production of a desired compound from C. glutamicum based on genetic engineering of SES genes in this organism.

### RELATED APPLICATIONS

[0001] This application claims priority to prior filed U.S. Provisional Patent Application Ser. No. 60/141031, filed Jun. 25, 1999, U.S. Provisional Patent Application Ser. No. 60/143752, filed Jul. 14, 1999, and U.S. Provisional Patent Application Ser. No. 60/151671, filed Aug. 8, 1999. This application also claims priority to prior filed German Patent Application No. 19931412.8, filed Jul. 8, 1999, and German Patent Application No. 19932928.1, filed Jul. 14, 1999. The entire contents of all of the aforementioned applications are expressly incorporated herein by this reference.

### BACKGROUND OF THE INVENTION

[0002] Certain products and by-products of naturally-occurring metabolic processes in cells have utility in a wide array of industries, including the food, feed, cosmetics, and pharmaceutical industries. These molecules, collectively termed ‘fine chemicals’, include organic acids, both proteinogenic and non-proteinogenic amino acids, nucleotides and nucleosides, lipids and fatty acids, diols, carbohydrates, aromatic compounds, vitamins and cofactors, and enzymes. Their production is most conveniently performed through the large-scale culture of bacteria developed to produce and secrete large quantities of one or more desired molecules. One particularly useful organism for this purpose is Corynebacterium glutamicum, a gram positive, nonpathogenic bacterium. Through strain selection, a number of mutant strains have been developed which produce an array of desirable compounds. However, selection of strains improved for the production of a particular molecule is a time-consuming and difficult process.

### SUMMARY OF THE INVENTION

[0003] The invention provides novel bacterial nucleic acid molecules which have a variety of uses. These uses include the identification of microorganisms which can be used to produce fine chemicals, the modulation of fine chemical production in C. glutamicum or related bacteria, the typing or identification of C. glutamicum or related bacteria, as reference points for mapping the C. glutamicum genome, and as markers for transformation. These novel nucleic acid molecules encode proteins, referred to herein as stability, gene expression, or protein secretion/folding (SES) proteins.

[0004] C. glutamicum is a gram positive, aerobic bacterium which is commonly used in industry for the large-scale production of a variety of fine chemicals, and also for the degradation of hydrocarbons (such as in petroleum spills) and for the oxidation of terpenoids. The SES nucleic acid molecules of the invention, therefore, can be used to identify microorganisms which can be used to produce fine chemicals, e.g., by fermentation processes. Modulation of the expression of the SES nucleic acids of the invention, or modification of the sequence of the SES nucleic acid molecules of the invention, can be used to modulate the production of one or more fine chemicals from a microorganism (e.g., to improve the yield or production of one or more fine chemicals from a Corynebacterium or Brevibacterium species).

[0005] The SES nucleic acids of the invention may also be used to identify an organism as being Corynebacterium glutamicum or a close relative thereof, or to identify the presence of C. glutamicum or a relative thereof in a mixed population of microorganisms. The invention provides the nucleic acid sequences of a number of C. glutamicum genes; by probing the extracted genomic DNA of a culture of a unique or mixed population of microorganisms under stringent conditions with a probe spanning a region of a C. glutamicum gene which is unique to this organism, one can ascertain whether this organism is present. Although Corynebacterium glutamicum itself is nonpathogenic, it is related to species pathogenic in humans, such as Corynebacterium diphtheriae (the causative agent of diphtheria); the detection of such organisms is of significant clinical relevance.

[0006] The SES nucleic acid molecules of the invention may also serve as reference points for mapping of the C. glutamicum genome, or of genomes of related organisms. Similarly, these molecules, or variants or portions thereof, may serve as markers for genetically engineered Corynebacterium or Brevibacterium species.

[0007] e.g.e.g. The SES proteins encoded by the novel nucleic acid molecules of the invention are capable of, for example, performing a function involved in the repair or recombination of DNA, transposition of genetic material, expression of genes (i.e., involved in transcription or translation), protein folding, or protein secretion in Corynebacterium glutamicum. Given the availability of cloning vectors for use in Corynebacterium glutamicum, such as those disclosed in Sinskey et al., U.S. Pat. No. 4,649,119, and techniques for genetic manipulation of C. glutamicum and the related Brevibacterium species (e.g., lactofermentum) (Yoshihama et al, J. Bacteriol. 162: 591-597 (1985); Katsumata et al., J. Bacteriol. 159: 306-311 (1984); and Santamaria et al., J. Gen. Microbiol. 130: 2237-2246 (1984)), the nucleic acid molecules of the invention may be utilized in the genetic engineering of this organism to make it a better or more efficient producer of one or more fine chemicals. This improved production or efficiency of production of a fine chemical may be due to a direct effect of manipulation of a gene of the invention, or it may be due to an indirect effect of such manipulation.

[0008] There are a number of mechanisms by which the alteration of an SES protein of the invention may directly affect the yield, production, and/or efficiency of production of a fine chemical from a C. glutamicum strain incorporating such an altered protein. For example, modulation of proteins involved directly in transcription or translation (e.g., polymerases or ribosomes) such that they are increased in number or in activity should increase global cellular transcription or translation (or rates of these processes). This increased cellular gene expression should include those proteins involved in fine chemical biosynthesis, so an increase in yield, production, or efficiency of production of one or more desired compounds may occur. Modifications to the transcriptional/translational protein machinery of C. glutamicum such that the regulation of these proteins is altered may also permit increased expression of genes involved in the production of fine chemicals. Modulation of the activity or number of proteins involved in polypeptide folding may permit an increase in the overall production of correctly folded molecules in the cell, thereby increasing the possibility that desired proteins (e.g., fine chemical biosynthetic proteins) are able to function properly. Further, by mutating proteins involved in secretion from C. glutamicum such that they are increased in number or activity, it may be possible to increase the secretion of a fine chemical (e.g., an enzyme) from cells in fermentor culture, where it may be readily recovered.

[0009] Genetic modification of the SES molecules of the invention may also result in indirect modulation of production of one or more fine chemicals. For example, by increasing the number or activity of a DNA repair or recombination protein of the invention, one may increase the ability of the cell to detect and repair DNA damage. This should effectively increase the ability of the cell to maintain a mutated gene within its genome, thereby increasing the likelihood that a transgene engineered into C. glutamicum (e.g., encoding a protein which will increase biosynthesis of a fine chemical) will not be lost during culture of the microorganism. Conversely, by decreasing the number or activity of one or more DNA repair or recombination proteins, it may be possible to increase the genetic instability of the organism. Such manipulations should improve the ability of the organism to be modified by mutagenesis without the introduced mutation being corrected. The same holds true for proteins involved in transposition or rearrangement of genetic elements in C. glutamicum (e.g., transposons). By mutagenizing these proteins such that they are either increased or decreased in number or activity, it is possible to simultaneously increase or decrease the genetic stability of the microorganism. This has a profound impact on the ability of any other mutation to be introduced into C. glutamicum, and on the ability of introduced mutations to be retained. Transposons also offer a convenient mechanism by which mutagenesis of C. glutamicum may be performed; duplication of desired genes (e.g., fine chemical biosynthetic genes) is readily accomplished by transposon mutagenesis, as is disruption of undesired genes (e.g., genes encoding proteins involved in degradation of desired fine chemicals).

[0010] By modulating one or more proteins (e.g. sigma factors) involved in the regulation of transcription or translation in response to particular environmental conditions, it may be possible to prevent the cell from slowing or stopping protein synthesis under unfavorable environmental conditions, such as those found in large-scale fermentor culture. This should lead to increased gene expression, which in turn may permit increased biosynthesis of desired fine chemicals under such conditions. Mutagenesis of proteins involved in protein secretion systems may result in modulated secretion rates. Many such secreted proteins have functions critical for cell viability (e.g., cell surface proteases or receptors). An alteration of a secretory pathway such that these proteins are more readily transported to their extracellular location may improve the overall viability of the cell, and thus result in greater numbers of C. glutamicum cells capable of producing fine chemicals during large-scale culture. Further, the secretion apparatus (e.g., the sec system) is also known to be involved in the insertion of integral membrane proteins (e.g., pores, channels, or transporters) into the membrane. Thus, the modulation of activity of proteins involved in protein secretion from C. glutamicum may affect the ability of the cell to excrete waste products or to import necessary metabolites. If the activity of these secretory proteins is increased, then the ability of the cell to produce fine chemicals may be similarly increased. If the activity of these secretory proteins is decreased, then there may be insufficient nutrients available to support overproduction of desired compounds, or waste products may interfere with such biosynthesis.

[0011] The invention provides novel nucleic acid molecules which encode proteins, referred to herein as SES proteins, which are capable of, for example, participating in the repair or recombination of DNA, transposition of genetic material, expression of genes (i.e., the processes of transcription or translation), protein folding, or protein secretion in Corynebacterium glutamicum. Nucleic acid molecules encoding an SES protein are referred to herein as SES nucleic acid molecules. In a preferred embodiment, an SES protein participates in improving or decreasing genetic stability in C. glutamicum, in the expression of genes (i.e., in transcription or translation) or protein folding in this organism, or in protein secretion from C. glutamicum. Examples of such proteins include those encoded by the genes set forth in Table 1.

[0012] Accordingly, one aspect of the invention pertains to isolated nucleic acid molecules (e.g., cDNAs, DNAs, or RNAs) comprising a nucleotide sequence encoding an SES protein or biologically active portions thereof, as well as nucleic acid fragments suitable as primers or hybridization probes for the detection or amplification of SES-encoding nucleic acid (e.g., DNA or mRNA). In particularly preferred embodiments, the isolated nucleic acid molecule comprises one of the nucleotide sequences set forth in Appendix A or the coding region or a complement thereof of one of these nucleotide sequences. In other particularly preferred embodiments, the isolated nucleic acid molecule of the invention comprises a nucleotide sequence which hybridizes to or is at least about 50%, preferably at least about 60%, more preferably at least about 70%, 80% or 90%, and even more preferably at least about 95%, 96%, 97%, 98%, 99% or more homologous to a nucleotide sequence set forth in Appendix A, or a portion thereof. In other preferred embodiments, the isolated nucleic acid molecule encodes one of the amino acid sequences set forth in Appendix B. The preferred SES proteins of the present invention also preferably possess at least one of the SES activities described herein.

[0013] In another embodiment, the isolated nucleic acid molecule encodes a protein or portion thereof wherein the protein or portion thereof includes an amino acid sequence which is sufficiently homologous to an amino acid sequence of Appendix B, e.g., sufficiently homologous to an amino acid sequence of Appendix B such that the protein or portion thereof maintains an SES activity. Preferably, the protein or portion thereof encoded by the nucleic acid molecule maintains the ability to participate in the repair or recombination of DNA, in the transposition of genetic material, in gene expression (i.e., the processes of transcription or translation), in protein folding, or in protein secretion in Corynebacterium glutamicum. In one embodiment, the protein encoded by the nucleic acid molecule is at least about 50%, preferably at least about 60%, and more preferably at least about 70%, 80%, or 90% and most preferably at least about 95%, 96%, 97%, 98%, or 99% or more homologous to an amino acid sequence of Appendix B (e.g., an entire amino acid sequence selected from those sequences set forth in Appendix B). In another preferred embodiment, the protein is a full length C. glutamicum protein which is substantially homologous to an entire amino acid sequence of Appendix B (encoded by an open reading frame shown in Appendix A).

[0014] In another preferred embodiment, the isolated nucleic acid molecule is derived from C. glutamicum and encodes a protein (e.g., an SES fusion protein) which includes a biologically active domain which is at least about 50% or more homologous to one of the amino acid sequences of Appendix B and is able to participate in the repair or recombination of DNA, in the transposition of genetic material, in gene expression (i.e., the processes of transcription or translation), in protein folding, or in protein secretion in Corynebacterium glutamicum, or has one or more of the activities set forth in Table 1, and which also includes heterologous nucleic acid sequences encoding a heterologous polypeptide or regulatory regions.

[0015] In another embodiment, the isolated nucleic acid molecule is at least 15 nucleotides in length and hybridizes under stringent conditions to a nucleic acid molecule comprising a nucleotide sequence of Appendix A. Preferably, the isolated nucleic acid molecule corresponds to a naturally-occurring nucleic acid molecule. More preferably, the isolated nucleic acid encodes a naturally-occurring C. glutamicum SES protein, or a biologically active portion thereof.

[0016] Another aspect of the invention pertains to vectors, e.g., recombinant expression vectors, containing the nucleic acid molecules of the invention, and host cells into which such vectors have been introduced. In one embodiment, such a host cell is used to produce an SES protein by culturing the host cell in a suitable medium. The SES protein can be then isolated from the medium or the host cell.

[0017] Yet another aspect of the invention pertains to a genetically altered microorganism in which an SES gene has been introduced or altered. In one embodiment, the genome of the microorganism has been altered by introduction of a nucleic acid molecule of the invention encoding wild-type or mutated SES sequence as a transgene. In another embodiment, an endogenous SES gene within the genome of the microorganism has been altered, e.g., functionally disrupted, by homologous recombination with an altered SES gene. In another embodiment, an endogenous or introduced SES gene in a microorganism has been altered by one or more point mutations, deletions, or inversions, but still encodes a functional SES protein. In still another embodiment, one or more of the regulatory regions (e.g., a promoter, repressor, or inducer) of an SES gene in a microorganism has been altered (e.g., by deletion, truncation, inversion, or point mutation) such that the expression of the SES gene is modulated. In a preferred embodiment, the microorganism belongs to the genus Corynebacterium or Brevibacterium, with Corynebacterium glutamicum being particularly preferred. In a preferred embodiment, the microorganism is also utilized for the production of a desired compound, such as an amino acid, with lysine being particularly preferred.

[0018] In another aspect, the invention provides a method of identifying the presence or activity of Cornyebacterium diphtheriae in a subject. This method includes detection of one or more of the nucleic acid or amino acid sequences of the invention (e.g., the sequences set forth in Appendix A or Appendix B) in a subject, thereby detecting the presence or activity of Corynebacterium diphtheriae in the subject.

[0019] Still another aspect of the invention pertains to an isolated SES protein or a portion, e.g., a biologically active portion, thereof. In a preferred embodiment, the isolated SES protein or portion thereof can participate in the repair or recombination of DNA, in the transposition of genetic material, in gene expression (i.e., the processes of transcription or translation), in protein folding, or in protein secretion in Corynebacterium glutamicum. In another preferred embodiment, the isolated SES protein or portion thereof is sufficiently homologous to an amino acid sequence of Appendix B such that the protein or portion thereof maintains the ability to participate in the repair or recombination of DNA, in the transposition of genetic material, in gene expression (i.e., the processes of transcription or translation), in protein folding, or in protein secretion in Corynebacterium glutamicum.

[0020] The invention also provides an isolated preparation of an SES protein. In preferred embodiments, the SES protein comprises an amino acid sequence of Appendix B. In another preferred embodiment, the invention pertains to an isolated full length protein which is substantially homologous to an entire amino acid sequence of Appendix B (encoded by an open reading frame set forth in Appendix A). In yet another embodiment, the protein is at least about 50%, preferably at least about 60%, and more preferably at least about 70%, 80%, or 90%, and most preferably at least about 95%, 96%, 97%, 98%, or 99% or more homologous to an entire amino acid sequence of Appendix B. In other embodiments, the isolated SES protein comprises an amino acid sequence which is at least about 50% or more homologous to one of the amino acid sequences of Appendix B and is able to participate in the repair or recombination of DNA, in the transposition of genetic material, in gene expression (i.e., the processes of transcription or translation), in protein folding, or in protein secretion in Corynebacterium glutamicum, or has one or more of the activities set forth in Table 1.

[0021] Alternatively, the isolated SES protein can comprise an amino acid sequence which is encoded by a nucleotide sequence which hybridizes, e.g., hybridizes under stringent conditions, or is at least about 50%, preferably at least about 60%, more preferably at least about 70%, 80%, or 90%, and even more preferably at least about 95%, 96%, 97%, 98, %, or 99% or more homologous, to a nucleotide sequence of Appendix B. It is also preferred that the preferred forms of SES proteins also have one or more of the SES bioactivities described herein.

[0022] The SES polypeptide, or a biologically active portion thereof, can be operatively linked to a non-SES polypeptide to form a fusion protein. In preferred embodiments, this fusion protein has an activity which differs from that of the SES protein alone. In other preferred embodiments, this fusion protein participates in the repair or recombination of DNA, in the transposition of genetic material, in gene expression (i.e., the processes of transcription or translation), in protein folding, or in protein secretion in Corynebacterium glutamicum. In particularly preferred embodiments, integration of this fusion protein into a host cell modulates production of a desired compound from the cell.

[0023] In another aspect, the invention provides methods for screening molecules which modulate the activity of an SES protein, either by interacting with the protein itself or a substrate or binding partner of the SES protein, or by modulating the transcription or translation of an SES nucleic acid molecule of the invention.

[0024] Another aspect of the invention pertains to a method for producing a fine chemical. This method involves the culturing of a cell containing a vector directing the expression of an SES nucleic acid molecule of the invention, such that a fine chemical is produced. In a preferred embodiment, this method further includes the step of obtaining a cell containing such a vector, in which a cell is transfected with a vector directing the expression of an SES nucleic acid. In another preferred embodiment, this method further includes the step of recovering the fine chemical from the culture. In a particularly preferred embodiment, the cell is from the genus Corynebacterium or Brevibacterium, or is selected from those strains set forth in Table 3.

[0025] Another aspect of the invention pertains to methods for modulating production of a molecule from a microorganism. Such methods include contacting the cell with an agent which modulates SES protein activity or SES nucleic acid expression such that a cell associated activity is altered relative to this same activity in the absence of the agent. In a preferred embodiment, the cell is modulated for one or more C. glutamicum processes involved in genetic stability, gene expression, protein folding, or protein secretion such that the yield, production, or efficiency of production of a desired fine chemical by this microorganism is improved. The agent which modulates SES protein activity can be an agent which stimulates SES protein activity or SES nucleic acid expression. Examples of agents which stimulate SES protein activity or SES nucleic acid expression include small molecules, active SES proteins, and nucleic acids encoding SES proteins that have been introduced into the cell. Examples of agents which inhibit SES activity or expression include small molecules and antisense SES nucleic acid molecules.

[0026] Another aspect of the invention pertains to methods for modulating yields of a desired compound from a cell, involving the introduction of a wild-type or mutant SES gene into a cell, either maintained on a separate plasmid or integrated into the genome of the host cell. If integrated into the genome, such integration can be random, or it can take place by homologous recombination such that the native gene is replaced by the introduced copy, causing the production of the desired compound from the cell to be modulated. In a preferred embodiment, said yields are increased. In another preferred embodiment, said chemical is a fine chemical. In a particularly preferred embodiment, said fine chemical is an amino acid. In especially preferred embodiments, said amino acid is L-lysine.

### DETAILED DESCRIPTION OF THE INVENTION

[0027] The present invention provides SES nucleic acid and protein molecules which are involved in the repair or recombination of DNA, in the transposition of genetic material, in gene expression (i.e., the processes of transcription or translation), in protein folding, or in protein secretion in Corynebacterium glutamicum. The molecules of the invention may be utilized in the modulation of production of fine chemicals from microorganisms, such as C. glutamicum, either directly (e.g., where overexpression or optimization of activity of a protein involved in secretion of a fine chemical (e.g., an enzyme) has a direct impact on the yield, production, and/or efficiency of production of a fine chemical from the modified C. glutamicum), or an indirect impact which nonetheless results in an increase of yield, production, and/or efficiency of production of the desired compound (e.g., where modulation of the activity or number of copies of a C. glutamicum DNA repair protein results in alterations in the ability of the microorganism to maintain the introduced mutation, which in turn may impact the production of one or more fine chemicals from such a strain). Aspects of the invention are further explicated below.

I. Fine Chemicals

[0028] The term ‘fine chemical’ is art-recognized and includes molecules produced by an organism which have applications in various industries, such as, but not limited to, the pharmaceutical, agriculture, and cosmetics industries. Such compounds include organic acids, such as tartaric acid, itaconic acid, and diaminopimelic acid, both proteinogenic and non-proteinogenic amino acids, purine and pyrimidine bases, nucleosides, and nucleotides (as described e.g. in Kuninaka, A. (1996) Nucleotides and related compounds, p. 561-612, in Biotechnology vol. 6, Rehm et al., eds. VCH: Weinheim, and references contained therein), lipids, both saturated and unsaturated fatty acids (e.g., arachidonic acid), diols (e.g., propane diol, and butane diol), carbohydrates (e.g., hyaluronic acid and trehalose), aromatic compounds (e.g., aromatic amines, vanillin, and indigo), vitamins and cofactors (as described in Ullmann's Encyclopedia of Industrial Chemistry, vol. A27, “Vitamins”, p. 443-613 (1996) VCH: Weinheim and references therein; and Ong, A. S., Niki, E. & Packer, L. (1995) “Nutrition, Lipids, Health, and Disease” Proceedings of the UNESCO/Confederation of Scientific and Technological Associations in Malaysia, and the Society for Free Radical Research—Asia, held Sep. 1-3, 1994 at Penang, Malaysia, AOCS Press, (1995)), enzymes, polyketides (Cane et al.(1998) Science 282: 63-68), and all other chemicals described in Gutcho (1983) Chemicals by Fermentation, Noyes Data Corporation, ISBN: 0818805086 and references therein. The metabolism and uses of certain of these fine chemicals are further explicated below.

A. Amino Acid Metabolism and Uses

[0029] Amino acids comprise the basic structural units of all proteins, and as such are essential for normal cellular functioning in all organisms. The term “amino acid” is art-recognized. The proteinogenic amino acids, of which there are 20 species, serve as structural units for proteins, in which they are linked by peptide bonds, while the nonproteinogenic amino acids (hundreds of which are known) are not normally found in proteins (see Ulmann's Encyclopedia of Industrial Chemistry, vol. A2, p. 57-97 VCH: Weinheim (1985)). Amino acids may be in the D- or L- optical configuration, though L-amino acids are generally the only type found in naturally-occurring proteins. Biosynthetic and degradative pathways of each of the 20 proteinogenic amino acids have been well characterized in both prokaryotic and eukaryotic cells (see, for example, Stryer, L. Biochemistry, 3^{rd} edition, pages 578-590 (1988)). The ‘essential’ amino acids (histidine, isoleucine, leucine, lysine, methionine, phenylalanine, threonine, tryptophan, and valine), so named because they are generally a nutritional requirement due to the complexity of their biosyntheses, are readily converted by simple biosynthetic pathways to the remaining 11 ‘nonessential’ amino acids (alanine, arginine, asparagine, aspartate, cysteine, glutamate, glutamine, glycine, proline, serine, and tyrosine). Higher animals do retain the ability to synthesize some of these amino acids, but the essential amino acids must be supplied from the diet in order for normal protein synthesis to occur.

[0030] Aside from their function in protein biosynthesis, these amino acids are interesting chemicals in their own right, and many have been found to have various applications in the food, feed, chemical, cosmetics, agriculture, and pharmaceutical industries. Lysine is an important amino acid in the nutrition not only of humans, but also of monogastric animals such as poultry and swine. Glutamate is most commonly used as a flavor additive (mono-sodium glutamate, MSG) and is widely used throughout the food industry, as are aspartate, phenylalanine, glycine, and cysteine. Glycine, L-methionine and tryptophan are all utilized in the pharmaceutical industry. Glutamine, valine, leucine, isoleucine, histidine, arginine, proline, serine and alanine are of use in both the pharmaceutical and cosmetics industries. Threonine, tryptophan, and D/ L-methionine are common feed additives. (Leuchtenberger, W. (1996) Amino aids—technical production and use, p. 466-502 in Rehm et al.(eds.) Biotechnology vol. 6, chapter 14a, VCH: Weinheim). Additionally, these amino acids have been found to be useful as precursors for the synthesis of synthetic amino acids and proteins, such as N-acetylcysteine, S-carboxymethyl-L-cysteine, (S)-5-hydroxytryptophan, and others described in Ulmann's Encyclopedia of Industrial Chemistry, vol. A2, p. 57-97, VCH: Weinheim, 1985.

[0031] The biosynthesis of these natural amino acids in organisms capable of producing them, such as bacteria, has been well characterized (for review of bacterial amino acid biosynthesis and regulation thereof, see Umbarger, H. E.(1978) Ann. Rev. Biochem. 47: 533-606). Glutamate is synthesized by the reductive amination of α-ketoglutarate, an intermediate in the citric acid cycle. Glutamine, proline, and arginine are each subsequently produced from glutamate. The biosynthesis of serine is a three-step process beginning with 3-phosphoglycerate (an intermediate in glycolysis), and resulting in this amino acid after oxidation, transamination, and hydrolysis steps. Both cysteine and glycine are produced from serine; the former by the condensation of homocysteine with serine, and the latter by the transferal of the side-chain β-carbon atom to tetrahydrofolate, in a reaction catalyzed by serine transhydroxymethylase. Phenylalanine, and tyrosine are synthesized from the glycolytic and pentose phosphate pathway precursors erythrose 4-phosphate and phosphoenolpyruvate in a 9-step biosynthetic pathway that differ only at the final two steps after synthesis of prephenate. Tryptophan is also produced from these two initial molecules, but its synthesis is an 11-step pathway. Tyrosine may also be synthesized from phenylalanine, in a reaction catalyzed by phenylalanine hydroxylase. Alanine, valine, and leucine are all biosynthetic products of pyruvate, the final product of glycolysis. Aspartate is formed from oxaloacetate, an intermediate of the citric acid cycle. Asparagine, methionine, threonine, and lysine are each produced by the conversion of aspartate. Isoleucine is formed from threonine. A complex 9-step pathway results in the production of histidine from 5-phosphoribosyl-1-pyrophosphate, an activated sugar.

[0032] Amino acids in excess of the protein synthesis needs of the cell cannot be stored, and are instead degraded to provide intermediates for the major metabolic pathways of the cell (for review see Stryer, L. Biochemistry 3^{rd} ed. Ch. 21 “Amino Acid Degradation and the Urea Cycle” p. 495-516 (1988)). Although the cell is able to convert unwanted amino acids into useful metabolic intermediates, amino acid production is costly in terms of energy, precursor molecules, and the enzymes necessary to synthesize them. Thus it is not surprising that amino acid biosynthesis is regulated by feedback inhibition, in which the presence of a particular amino acid serves to slow or entirely stop its own production (for overview of feedback mechanisms in amino acid biosynthetic pathways, see Stryer, L. Biochemistry, 3^{rd} ed. Ch. 24: “Biosynthesis of Amino Acids and Heme” p. 575-600 (1988)). Thus, the output of any particular amino acid is limited by the amount of that amino acid present in the cell.

B. Vitamin, Cofactor, and Nutraceutical Metabolism and Uses

[0033] Vitamins, cofactors, and nutraceuticals comprise another group of molecules which the higher animals have lost the ability to synthesize and so must ingest, although they are readily synthesized by other organisms such as bacteria. These molecules are either bioactive substances themselves, or are precursors of biologically active substances which may serve as electron carriers or intermediates in a variety of metabolic pathways. Aside from their nutritive value, these compounds also have significant industrial value as coloring agents, antioxidants, and catalysts or other processing aids. (For an overview of the structure, activity, and industrial applications of these compounds, see, for example, Ullman's Encyclopedia of Industrial Chemistry, “Vitamins” vol. A27, p. 443-613, VCH: Weinheim, 1996.) The term “vitamin” is art-recognized, and includes nutrients which are required by an organism for normal functioning, but which that organism cannot synthesize by itself. The group of vitamins may encompass cofactors and nutraceutical compounds. The language “cofactor” includes nonproteinaceous compounds required for a normal enzymatic activity to occur. Such compounds may be organic or inorganic; the cofactor molecules of the invention are preferably organic. The term “nutraceutical” includes dietary supplements having health benefits in plants and animals, particularly humans. Examples of such molecules are vitamins, antioxidants, and also certain lipids (e.g., polyunsaturated fatty acids).

[0034] The biosynthesis of these molecules in organisms capable of producing them, such as bacteria, has been largely characterized (Ullman's Encyclopedia of Industrial Chemistry, “Vitamins” vol. A27, p. 443-613, VCH: Weinheim, 1996; Michal, G. (1999) Biochemical Pathways: An Atlas of Biochemistry and Molecular Biology, John Wiley & Sons; Ong, A. S., Niki, E. & Packer, L. (1995) “Nutrition, Lipids, Health, and Disease” Proceedings of the UNESCO/Confederation of Scientific and Technological Associations in Malaysia, and the Society for Free Radical Research—Asia, held Sep. 1-3, 1994 at Penang, Malaysia, AOCS Press: Champaign, Ill. X, 374 S).

[0035] Thiamin (vitamin B₁) is produced by the chemical coupling of pyrimidine and thiazole moieties. Riboflavin (vitamin B₂) is synthesized from guanosine-5′-triphosphate (GTP) and ribose-5′-phosphate. Riboflavin, in turn, is utilized for the synthesis of flavin mononucleotide (FMN) and flavin adenine dinucleotide (FAD). The family of compounds collectively termed ‘vitamin B₆’ (e.g., pyridoxine, pyridoxamine, pyridoxa-5′-phosphate, and the commercially used pyridoxin hydrochloride) are all derivatives of the common structural unit, 5-hydroxy-6-methylpyridine. Pantothenate (pantothenic acid, (R)-(+)-N-(2,4-dihydroxy-3,3-dimethyl- 1-oxobutyl)-β-alanine) can be produced either by chemical synthesis or by fermentation. The final steps in pantothenate biosynthesis consist of the ATP-driven condensation of P-alanine and pantoic acid. The enzymes responsible for the biosynthesis steps for the conversion to pantoic acid, to β-alanine and for the condensation to panthotenic acid are known. The metabolically active form of pantothenate is Coenzyme A, for which the biosynthesis proceeds in 5 enzymatic steps. Pantothenate, pyridoxal-5′-phosphate, cysteine and ATP are the precursors of Coenzyme A. These enzymes not only catalyze the formation of panthothante, but also the production of (R)-pantoic acid, (R)-pantolacton, (R)-panthenol (provitamin B₅), pantetheine (and its derivatives) and coenzyme A.

[0036] Biotin biosynthesis from the precursor molecule pimeloyl-CoA in microorganisms has been studied in detail and several of the genes involved have been identified. Many of the corresponding proteins have been found to also be involved in Fe-cluster synthesis and are members of the nifs class of proteins. Lipoic acid is derived from octanoic acid, and serves as a coenzyme in energy metabolism, where it becomes part of the pyruvate dehydrogenase complex and the α-ketoglutarate dehydrogenase complex. The folates are a group of substances which are all derivatives of folic acid, which is turn is derived from L-glutamic acid, p-amino-benzoic acid and 6-methylpterin. The biosynthesis of folic acid and its derivatives, starting from the metabolism intermediates guanosine-5′-triphosphate (GTP), L-glutamic acid and p-amino-benzoic acid has been studied in detail in certain microorganisms.

[0037] Corrinoids (such as the cobalamines and particularly vitamin B₁₂) and porphyrines belong to a group of chemicals characterized by a tetrapyrole ring system. The biosynthesis of vitamin B₁₂ is sufficiently complex that it has not yet been completely characterized, but many of the enzymes and substrates involved are now known. Nicotinic acid (nicotinate), and nicotinamide are pyridine derivatives which are also termed ‘niacin’. Niacin is the precursor of the important coenzymes NAD (nicotinamide adenine dinucleotide) and NADP (nicotinamide adenine dinucleotide phosphate) and their reduced forms.

[0038] The large-scale production of these compounds has largely relied on cell-free chemical syntheses, though some of these chemicals have also been produced by large-scale culture of microorganisms, such as riboflavin, Vitamin B₆, pantothenate, and biotin. Only Vitamin B₁₂ is produced solely by fermentation, due to the complexity of its synthesis. In vitro methodologies require significant inputs of materials and time, often at great cost.

C. Purine, Pyrimidine, Nucleoside and Nucleotide Metabolism and Uses

[0039] Purine and pyrimidine metabolism genes and their corresponding proteins are important targets for the therapy of tumor diseases and viral infections. The language “purine” or “pyrimidine” includes the nitrogenous bases which are constituents of nucleic acids, co-enzymes, and nucleotides. The term “nucleotide” includes the basic structural units of nucleic acid molecules, which are comprised of a nitrogenous base, a pentose sugar (in the case of RNA, the sugar is ribose; in the case of DNA, the sugar is D-deoxyribose), and phosphoric acid. The language “nucleoside” includes molecules which serve as precursors to nucleotides, but which are lacking the phosphoric acid moiety that nucleotides possess. By inhibiting the biosynthesis of these molecules, or their mobilization to form nucleic acid molecules, it is possible to inhibit RNA and DNA synthesis; by inhibiting this activity in a fashion targeted to cancerous cells, the ability of tumor cells to divide and replicate may be inhibited. Additionally, there are nucleotides which do not form nucleic acid molecules, but rather serve as energy stores (i.e., AMP) or as coenzymes (i.e., FAD and NAD).

[0040] Several publications have described the use of these chemicals for these medical indications, by influencing purine and/or pyrimidine metabolism (e.g. Christopherson, R. I. and Lyons, S. D. (1990) “Potent inhibitors of de novo pyrimidine and purine biosynthesis as chemotherapeutic agents.” Med. Res. Reviews 10: 505-548). Studies of enzymes involved in purine and pyrimidine metabolism have been focused on the development of new drugs which can be used, for example, as immunosuppressants or anti-proliferants (Smith, J. L., (1995) “Enzymes in nucleotide synthesis.” Curr. Opin. Struct. Biol. 5: 752-757; (1995) Biochem Soc. Transact. 23: 877-902). However, purine and pyrimidine bases, nucleosides and nucleotides have other utilities: as intermediates in the biosynthesis of several fine chemicals (e.g., thiamine, S-adenosyl-methionine, folates, or riboflavin), as energy carriers for the cell (e.g., ATP or GTP), and for chemicals themselves, commonly used as flavor enhancers (e.g., IMP or GMP) or for several medicinal applications (see, for example, Kuninaka, A. (1996) Nucleotides and Related Compounds in Biotechnology vol. 6, Rehm et al., eds. VCH: Weinheim, p. 561-612). Also, enzymes involved in purine, pyrimidine, nucleoside, or nucleotide metabolism are increasingly serving as targets against which chemicals for crop protection, including fungicides, herbicides and insecticides, are developed.

[0041] The metabolism of these compounds in bacteria has been characterized (for reviews see, for example, Zalkin, H. and Dixon, J. E. (1992) “de novo purine nucleotide biosynthesis”, in: Progress in Nucleic Acid Research and Molecular Biology, vol. 42, Academic Press:, p. 259-287; and Michal, G. (1999) “Nucleotides and Nucleosides”, Chapter 8 in: Biochemical Pathways: An Atlas of Biochemistry and Molecular Biology, Wiley: N.Y.). Purine metabolism has been the subject of intensive research, and is essential to the normal functioning of the cell. Impaired purine metabolism in higher animals can cause severe disease, such as gout. Purine nucleotides are synthesized from ribose-5-phosphate, in a series of steps through the intermediate compound inosine-5′-phosphate (IMP), resulting in the production of guanosine-5′-monophosphate (GMP) or adenosine-5′-monophosphate (AMP), from which the triphosphate forms utilized as nucleotides are readily formed. These compounds are also utilized as energy stores, so their degradation provides energy for many different biochemical.processes in the cell. Pyrimidine biosynthesis proceeds by the formation of uridine-5′-monophosphate (UMP) from ribose-5-phosphate. UMP, in turn, is converted to cytidine-5′-triphosphate (CTP). The deoxy- forms of all of these nucleotides are produced in a one step reduction reaction from the diphosphate ribose form of the nucleotide to the diphosphate deoxyribose form of the nucleotide. Upon phosphorylation, these molecules are able to participate in DNA synthesis.

D. Trehalose Metabolism and Uses

[0042] Trehalose consists of two glucose molecules, bound in α, α-1,1 linkage. It is commonly used in the food industry as a sweetener, an additive for dried or frozen foods, and in beverages. However, it also has applications in the pharmaceutical, cosmetics and biotechnology industries (see, for example, Nishimoto et al., (1998) U.S. Pat. No. 5,759,610; Singer, M. A. and Lindquist, S. (1998) Trends Biotech. 16: 460-467; Paiva, C. L. A. and Panek, A. D. (1996) Biotech. Ann. Rev. 2: 293-314; and Shiosaka, M. (1997) J. Japan 172: 97-102). Trehalose is produced by enzymes from many microorganisms and is naturally released into the surrounding medium, from which it can be collected using methods known in the art.

II. Genetic Stability; Protein Synthesis and Protein Secretion in C. glutamicum

[0043] The production of a desired compound from a cell such as C. glutamicum is the culmination of a large number of separate yet interrelated processes, each of which is critical to the overall production and release of the compound from the cell. In engineering a cell to overproduce one or more fine chemicals, consideration must be given to each of these processes to ensure that the biochemical machinery of the cell will be compatible with such genetic manipulation. Cellular mechanisms of particular importance include the stability of the altered gene(s) upon introduction into the cell, the ability of the mutated gene to be properly transcribed and translated (including issues of codon usage), and the ability of the mutant protein product to be appropriately folded and/or secreted.

A. Bacterial Repair and Recombination Systems

[0044] Cells are constantly exposed to nucleic acid-damaging agents, such as UV irradiation, oxygen radicals, and alkylation. Further, even the action of DNA polymerases is not error-free. Cells must maintain a balance between genetic stability (which ensures that genes necessary for vital cellular functions are not damaged during normal growth and metabolism) and genetic variability (which permits cells to adapt to a changing environment). Therefore, there exist separate, but interrelated pathways of DNA repair and DNA recombination in most cells. The former serves to stringently correct errors in DNA molecules by either directly reversing the damage or excising the damaged region and replacing it with the correct sequence. The latter recombination system also repairs nucleic acid molecules, but only those lesions that result in damage to both strands of DNA such that neither strand is able to serve as a template to correct the other. Recombination repair and the SOS response may readily lead to inversions, deletions, or other genetic rearrangements within or around the region of the damage, which in turn promotes a certain degree of genomic instability which may contribute to the ability of the cell to adapt to changing environments or stresses.

[0045] High-fidelity repair mechanisms include direct reversal of DNA damage and excision of damage and resynthesis using the information encoded on the opposite DNA strand. Direct reversal of damage requires an enzyme having an activity opposite of that which originally damaged the DNA. For example, inappropriate methylation of DNA may be corrected by the action of DNA repair methyltransferases, and nucleotide dimers created by UV irradiation may be fixed by the activity of deoxyribodipyrimidine photo-lyase, which, in the presence of light, cleaves the dimer back to its constituent nucleotides (see Michal, G. (1999) Biochemical Pathways: An Atlas of Biochemistry and Molecular Biology, Wiley: N.Y., and references therein).

[0046] Precise repair of more extensive damage requires specialized repair mechanisms. These include the mismatch repair and excision repair systems. Damage to a single base may be corrected by a series of cleavage reactions, where first the sugar-base bond is cut, followed by cleavage of the DNA backbone at the site of damage and removal of the damaged base itself. Finally, DNA polymerase and DNA ligase act to fill in and seal the gap using the second DNA strand as a template. More significant DNA damage which results in altered conformation of the double helix is corrected by the ABC system, in which helicase II, DNA polymerase I, UvrA, UvrB, and UvrC proteins combine to nick the double helix at the site of damage, to unwind the damaged region in an ATP-dependent fashion, to excise the damaged region, and to fill in the missing region using the other strand as a template. Lastly, DNA ligase seals the nick. Specific repair systems also exist for G·T mismatches (involving the Vsr protein) and for small deletion/insertion errors resulting in mispairing of the two strands (involving the methylation-directed pathway).

[0047] There also exist low-fidelity repair systems which are generally used to correct very extensive DNA damage in bacteria. Double-strand repair and recombination occurs in the presence of a lesion which affects both strands of DNA. In this situation, it is impossible to repair the damage utilizing the other strand as the template. Thus, this repair system involves a double-crossover event between the area of the lesion and another copy of the region on a homologous DNA molecule. This is possible because bacteria divide so rapidly that a second copy of genomic DNA is usually available before actual cell division occurs. This crossover event may readily lead to inversions, duplications, deletions, insertions and other genetic rearrangements, and thus increases the overall genetic instability of the organism.

[0048] The SOS response is activated when sufficient damage is present in the DNA that DNA polymerase III stalls and cannot continue replication. Under these circumstances, single-stranded DNA is present. The RecA protein is activated by binding to single-stranded DNA, and this activated form results in the activation of the LexA repressor, thereby lifting the transcriptional block of more than 20 genes, including UvrA, UvrB, UvrC, helicase II, DNA pol III, UmuC, and UmuD. The combined activities of these enzymes results in sufficient filling of the gap region that DNA pol III is able to resume replication. However, these gaps have been filled in with bases which should not be present; thus, this type of repair results in error-prone repair, contributing to overall genetic instability in the cell.

B. Transposons

[0049] The aforementioned systems, whether high or low fidelity, exist to repair DNA damage. In certain circumstances, this repair may accidentally incorporate additional genetic rearrangements. Many bacterial cells also have mechanisms specifically designed to cause such genetic rearrangements. Particularly well-known examples of such mechanisms are the transposons.

[0050] Transposons are genetic elements which are able to move from one site to another either within a chromosome or between a piece of extrachromosomal DNA (e.g., a plasmid) and a chromosome. Transposition may occur in multiple ways; for example, the transposable element may be cut out from the donor site and integrated into the target site (nonreplicative transposition), or the transposable element may alternately be duplicated from the donor site to the target site, yielding two copies of the element (replicative transposition). There is generally no sequence relationship between the donor and target sites.

[0051] There are a variety of results possible from such a transposition event. The integration of a transposable element into a gene disrupts the gene, usually abrogating its function entirely. An integration event that occurs in the DNA surrounding a gene may not perturb the coding sequence itself, but can have a profound effect on the regulation of the gene and thus, on its expression. Recombination events between two copies of a transposable element found in different portions of the genome may result in deletions, duplications, inversions, transpositions, or amplifications of segments of the genome. It is also possible for different replicons to fuse.

[0052] The simplest transposon-like genetic elements are termed insertion (IS) elements. IS elements contain a nucleotide region of varying length (though usually less than 1500 bases) lacking any coding regions, surrounded by inverted repeats at either end. Thus, since the IS element does not encode any proteins whose activity may be detected, the presence of an IS element is generally only observed due to a loss of function of one or more genes in which the IS element is inserted.

[0053] Transposons are mobile genetic elements which, unlike IS elements, contain nucleic acid sequences bounded by repeats which may encode one or more proteins. It is not unusual for these repeat regions to consist of IS elements. The proteins encoded by the transposon are typically transposases (proteins which catalyze the movement of the transposon from one site to another) and antibiotic resistance genes. The mechanisms and regulation of transposable elements are well known in the art and are have been described at least in, for example, Lengeler et al.(1999) Biology of Prokaryotes, Thieme Verlag: Stuttgart, p. 375-361; Neidhardt et al.(1996) Escherichia coli and Salmonella, ASM Press: Washington, D.C.; Sonenshein, A. L. et al., eds. (1993), Bacillus subtilis, ASM Press: Washington, D.C.; Voet, D. and Voet, J. G. (1992) Biochemie, VCH: Weinheim, p. 985-990; Brock, T. D., and Madigan, M. T. (1991) Biology of Microorganisms, 6^{th} ed., Prentice Hall: New York, p. 267-269; and Kleckner, N. (1990) “Regulation of transposition in bacteria”, Annu. Rev. Biochem. 61: 297-327.

C. Transcription

[0054] Gene expression in bacteria is regulated mainly at the level of transcription. The transcriptional apparatus consists of a number of proteins that can be divided into two groups: RNA polymerase (the processive DNA-transcribing enzyme) and sigma factors (which regulate gene transcription by directing RNA polymerase to specific promoter-DNA sequences which these factors recognize). The combination of RNA polymerase and sigma factors creates the RNA polymerase holoenzyme, an activated complex. Gram positive bacteria such as Corynebacteria contain only one type of RNA-polymerase, but a variety of different sigma factors specific for different promoters, growth phases, environmental conditions, substrates, oxygen levels, transport processes, and the like, which permits adaptability of the organism to different environmental and metabolic conditions.

[0055] Promoters are specific DNA sequences that serve as docking sites for the RNA polymerase holoenzyme. Many promoter elements possess conserved sequence elements that may be recognized through homology searches; alternately, promoter regions for a particular gene may be identified using standard techniques such as primer extension. Many promoter regions from gram-positive bacteria are known (see, e.g., Sonenshein, A. L., Hoch, J. A., and Losick, R., eds. (1993) Bacillus subtilis, ASM Press: Washington, D.C.).

[0056] Promoter transcriptional control is influenced by several mechanisms of repression or activation. Specific regulatory proteins which bind promoters have the ability to block (repressors) or to assist (activators) the binding of the RNA holoenzyme, and thus to regulate transcription. The binding of these repressor and activator molecules in turn is regulated by their interactions with other molecules, such as proteins or other metabolic compounds. Transcription may alternately be regulated by factors influencing processes such as elongation or termination (see, e.g., Sonenshein, A. L., Hoch, J. A., and Losick, R., eds. (1993) Bacillus subtilis, ASM Press: Washington, D.C.). The ability to regulate transcription of genes in response to a variety of environmental or metabolic cues affords cells the ability to tightly control when a gene may be expressed and or how much of a gene product may be present in the cell at one time. This in turn prevents unnecessary expenditure of energy or unnecessary utilization of possibly scarce intermediate compounds or cofactors.

D. Translation and tRNA-Aminoacyl Synthetases

[0057] Translation is the process by which a polypeptide is synthesized from amino acids according to the information contained within an mRNA molecule. The main components of this process are ribosomes and specific initiation or elongation factors, such as IF 1-3, EF-G, and EFTu (see, e.g., Sonenshein, A. L., Hoch, J. A., Losick, R., eds. (1993) Bacillus subtilis, ASM Press: Washington, D.C.).

[0058] Each codon of the mRNA molecule encodes a particular amino acid. The conversion from mRNA to amino acid is effected by transfer RNA (tRNA) molecules. These molecules consist of a single strand of RNA (between 60 and 100 bases), which exists in an L-shaped three dimensional structure having protruding areas, or ‘arms’. One such arm forms base pairs with a particular codon sequence on the mRNA molecule. A second arm interacts specifically with a particular amino acid (the one encoded by the codon). Other arms of the tRNA include the variable arm, the TψC arm (which bears thimidylate and pseudouridylate modifications), and the D arm (which bears a dihydrouridine modification). The function of these latter structures remains unknown, but their conservation between tRNA molecules suggests a role in protein synthesis.

[0059] In order for the nucleic acid-based tRNA molecule to associate with the correct amino acid, a family of enzymes, termed the aminoacyl-tRNA synthetases, must act. There exist many different of these enzymes, each of which is specific for a particular tRNA and a particular amino acid. These enzymes link the 3′ hydroxyl of the terminal tRNA adenosine ribose moiety to the amino acid in a two step reaction. First, the enzyme is activated by reaction with ATP and the amino acid to result in an aminoacyl-tRNA synthetase-aminoacyl adenylate complex. Second, the aminoacyl group is transferred from the enzyme to the target tRNA where it remains in the high-energy state. Binding of the tRNA molecule to its cognate codon on the mRNA molecule then brings the high-energy amino acid attached to the tRNA into contact with the ribosome. Within the ribosome, the amino-acid charged tRNA (aminoacyl-tRNA) occupies one binding site (the A site) adjacent to a second site (the P site) containing a tRNA molecule whose amino acid arm is attached to the nascent polypeptide chain (peptidyl-tRNA). The activated amino acid on the aminoacyl-tRNA is sufficiently reactive that a peptide bond spontaneously forms between this amino acid and the next amino acid on the nascent polypeptide chain. Hydrolysis of GTP provides the energy for the transfer of the now-polypeptide chain-loaded tRNA from the A site to the P site of the ribosome, and the process repeats until a stop codon is reached.

[0060] There are a number of different steps at which translation may be regulated. These include the binding of the ribosome to mRNA, the presence of mRNA secondary structure, codon usage, or the abundance of particular tRNAs. Also, special regulation mechanisms such as attenuation may act at the level of translation. For an in-depth review of many of these mechanisms, see, e.g., Vellanoweth, R. L. (1993) “Translation and its Regulation” in: Bacillus subtilis and other Gram Positive Bacteria, Sonenshein, A. L. et al., eds., ASM Press: Washington D.C., p. 699-711, and references cited therein.

E. Protein Folding and Secretion

[0061] Synthesis of proteins by the ribosome results in polypeptide chains, which must take on a three-dimensional form before the protein can function normally. This three-dimensional structure is achieved by a process of folding. Polypeptide chains are flexible, and (in principle) move readily and freely in solution until they attain a conformation which results in a stable three-dimensional structure. However, it is sometimes difficult for proteins to fold correctly, either due to environmental conditions (e.g., high temperature, where the extra kinetic energy present in the system makes it more difficult for the polypeptide to settle in the energy well of a stable structure) or due to the nature of the protein itself (e.g., the hydrophobic regions in nearby polypeptides have a tendency to aggregate and thereby sequester themselves from aqueous solution).

[0062] Proteinaceous factors have been identified that are able to catalyze, chaperone, or otherwise assist in the folding of proteins being synthesized either co- or posttranslationally. Members of these protein folding molecules are the prolyl-peptidyl isomerases (e.g., trigger factor, cyclophilin, and FKBP homologs), and proteins of the heat shock protein group (e.g., DnaK, DnaJ, GroEL, small heat shock proteins, HtpG and members of the Clp family (e.g., ClpA, ClpB, ClpW, ClpP, and ClpX)). Many of these proteins are essential for the viability of cells: in addition to their functions in protein folding, translocation, and processing, they frequently serve as key targets for the overall regulation of protein synthesis (see, e.g., Bukau, B., (1993) Molecular Microbiology 9(4): 671-680; Bukau, B., and Horwich, A. L. (1998) Cell 92(3):351-366; Hesterkamp, T., Bukau, C. (1996) FEBS Lett. 389(l):32-34; Yaron, A., Naider, F. (1993) Critical Reviews in Biochemistry and Molecular Biology 28(1):31-81; Scheibel, R., Buchner, J. (1998) Biochemical Pharmacology 56(6):675-682; Ellis, R. J., Harti, F. U. (1996) FASEB Journal 10(1): 20-26; Wawrzynow, A. et al. (1996) Molecular Microbiology 21(5): 895-899; Ewalt, K. L., et al.(1997) Cell 90(3): 491-500).

[0063] Chaperones identified thus far function in one of two ways: they either bind and stabilize polypeptides, or they provide an environment in which folding may occur without interference. The former group, including, e.g., DnaK, DnaJ, and the heat shock proteins, bind directly to the nascent or misfolded polypeptide, frequently with concomitant ATP hydrolysis. The association of the chaperone prevents the polypeptide from aggregating with other polypeptides, and can force such aggregates to dissipate if they have already formed. After interaction with a second chaperone, GrpE (which permits an ADP-ATP exchange to occur), the polypeptide is released in a molten globule state and is permitted to fold. If misfolding occurs, the chaperones again associate with the misfolded protein, forcing it to return to an unfolded state. This cycle may be repeated until the protein is correctly folded. Unlike the first type of chaperones, which simply bind to the polypeptide, the second group (e.g. GroEL/ES) not only bind to the polypeptide, but also completely surround it such that it is protected from the surrounding environment. The GroEL/ES complex is composed of 2 stacked 14-member rings having a hydrophobic interior surface, and a 7-membered ring ‘cap’. The polypeptide is drawn into the channel in the center of this complex in an ATP-dependent reaction where it is able to fold without interference from other polypeptides. Incorrectly folded proteins are not released from the complex.

[0064] An important step in protein folding is the creation of disulfide bonds. These bonds, either within a subunit or between subunits of a protein, are critical for protein stability. Disulfide bonds form readily in aqueous solution, and incorrect disulfide bond formation is difficult to reverse without the aid of a reducing environment. To assist in this process of correct disulfide bond formation, thiol-containing molecules, such as glutathione or thioredoxin, and their respective oxidation/reduction systems are found in the cytosol of most cells (Loferer, H., Hennecke, H. (1994) Trends in Biochemical Sciences 19(4): 169-171).

[0065] There are times, however, when folding of nascent polypeptide chains is not desirable, such as when these polypeptides are to be secreted. The folding process generally results in the hydrophobic regions of the protein being in the center of the protein, away from aqueous solution, and the hydrophilic regions being presented at the outer surfaces of the protein. This conformational arrangement, while creating greater stability for the protein, makes it difficult for the protein to be translocated across membranes, since the hydrophobic core of the membrane is inherently incompatible with the hydrophilic exterior of the protein. Thus, proteins synthesized by the cell which must be secreted to the exterior of the cell (e.g., cell surface enzymes and membrane receptors) or which must be inserted into the membrane itself (e.g., transporter proteins and channel proteins) are generally secreted or inserted prior to folding. The same chaperones which prevent aggregation of nascent polypeptide chains also prevent folding of polypeptides until they are disengaged. Thus, these proteins may ‘escort’ nascent polypeptide chains to an appropriate cellular location where they either are removed, thereby permitting folding, or they transfer the polypeptide to a transport system which will either secrete the polypeptide or aid its insertion into a membrane.

[0066] A specialized protein machinery has evolved that specifically detects, binds, transports, and processes proteins bearing specific prosequences (these sequences are later removed from the protein by cleavage). This machinery consists of a number of proteins which are collectively termed the sec (type II secretion) system (for review, see Gilbert, M. et al. (1995) Critical Reviews in Biotechnology 15(1): 13-39 and references therein; Freudl, R. (1992) Journal ofBiotechnology 23(3): 231-240 and references therein; Neidhardt, F. C. et aL(1996) E. coli and Salmonella ASM Press: Washington, D.C., p. 967-978; Binet, R. et al.(1997) Gene 192(1): 7-11; and Rapoport, T. A. (1986) Critical Reviews in Biochemistry 20(1): 73-137, and references therein). The sec system is composed of chaperones (e.g., SecA and SecB), integral membrane proteins, also called translocases (e.g., SecY, SecE, and SecG), and signal peptidases (e.g., LepB). The nascent polypeptide having a prosequence directing secretion is bound by SecB, which delivers it to SecA at the inner surface of the cell membrane. Sec A binds to the prosequence and, upon ATP hydrolysis, inserts into the membrane and forces a portion of the polypeptide through the membrane as well. The remainder of the polypeptide is guided through the membrane by a complex of translocases, such as SecY, SecE, and SecG. Finally, the signal peptidase cleaves off the prosequence and the polypeptide is free on the extracellular side of the membrane, where it spontaneously folds.

[0067] Sec-independent secretion mechanisms are also known. For example, the signal recognition particle-dependent pathway involves the binding of a signal recognition particle (SRP) protein to the nascent polypeptide as it is being synthesized, forcing the ribosome to stall. A receptor for SRP at the inner surface of the membrane then binds the ribosome-polypeptide-SRP complex. Hydrolysis of GTP provides the energy necessary to transfer the complex to the sec translocase complex, where the nascent polypeptide is guided across the membrane as it is synthesized by the ribosome. Other secretion mechanisms specific to only a few proteins are also known to exist.

III. Elements and Methods of the Invention

[0068] The present invention is based, at least in part, on the discovery of novel molecules, referred to herein as SES nucleic acid and protein molecules, which participate in C. glutamicum DNA repair or recombination, in the transposition or other rearrangement of C. glutamicum DNA, in C. glutamicum gene expression (e.g., the processes of transcription or translation), or in protein folding or protein secretion from this microorganism. In one embodiment, the SES molecules participate in the repair or recombination of DNA, in the transposition of genetic material, in gene expression (i e., the processes of transcription or translation), in protein folding, or in protein secretion in Corynebacterium glutamicum. In a preferred embodiment, the activity of the SES molecules of the present invention with regard to DNA repair or recombination, transposition of DNA, gene expression, protein folding or protein secretion has an impact on the production of a desired fine chemical by this organism. In a particularly preferred embodiment, the SES molecules of the invention are modulated in activity, such that the C. glutamicum cellular processes in which the SES molecules participate (e.g., DNA repair or recombination, transposition of DNA, gene expression, protein folding, or protein secretion) are also altered in activity, resulting either directly or indirectly in a modulation of the yield, production, and/or efficiency of production of a desired fine chemical by C. glutamicum.

[0069] The language, “SES protein” or “SES polypeptide” includes proteins which participate in a number of cellular processes related to C. glutamicum genetic stability, gene expression, protein folding, or protein secretion. For example, an SES protein may be involved in C. glutamicum DNA repair or recombination mechanisms, in rearrangements of C. glutamicum genetic material (such as those mediated by transposons), in transcription or translation of genes in this microorganism, in the mediation of C. glutamicum protein folding (such as the activity of chaperones) or in secretion of proteins from C. glutamicum cells (e.g., the sec system). Examples of SES proteins include those encoded by the SES genes set forth in Table 1 and Appendix A. The terms “SES gene” or “SES nucleic acid sequence” include nucleic acid sequences encoding an SES protein, which consist of a coding region and also corresponding untranslated 5′ and 3′ sequence regions. Examples of SES genes include those set forth in Table 1. The terms “production” or “productivity” are art-recognized and include the concentration of the fermentation product (for example, the desired fine chemical) formed within a given time and a given fermentation volume (e.g., kg product per hour per liter). The term “efficiency of production” includes the time required for a particular level of production to be achieved (for example, how long it takes for the cell to attain a particular rate of output of a fine chemical). The term “yield” or “product/carbon yield” is art-recognized and includes the efficiency of the conversion of the carbon source into the product (i.e., fine chemical). This is generally written as, for example, kg product per kg carbon source. By increasing the yield or production of the compound, the quantity of recovered molecules, or of useful recovered molecules of that compound in a given amount of culture over a given amount of time is increased. The terms “biosynthesis” or a “biosynthetic pathway” are art-recognized and include the synthesis of a compound, preferably an organic compound, by a cell from intermediate compounds in what may be a multistep and highly regulated process. The terms “degradation” or a “degradation pathway” are art-recognized and include the breakdown of a compound, preferably an organic compound, by a cell to degradation products (generally speaking, smaller or less complex molecules) in what may be a multistep and highly regulated process. The language “metabolism” is art-recognized and includes the totality of the biochemical reactions that take place in an organism. The metabolism of a particular compound, then, (e.g., the metabolism of an amino acid such as glycine) comprises the 6 overall biosynthetic, modification, and degradation pathways in the cell related to this compound. The term “DNA repair” is art-recognized and includes cellular mechanisms whereby errors in DNA (due either to damage, such as, but not limited to, ultraviolet radiation, methylases, low-fidelity replication, or mutagens) are excised and corrected. The term “recombination” or “DNA recombination” is art-recognized and includes cellular mechanisms whereby extensive DNA damage affecting both strands of a DNA molecule is corrected by homologous recombination with another, undamaged copy of the DNA molecule within the same cell. Such repairs are generally low-fidelity, and may result in genetic rearrangements. The term “transposon” is art-recognized and includes a DNA element which is able to insert randomly throughout the genome of an organism, and which may result in the disruption of genes or their regulatory regions, or in duplications, inversions, deletions, and other genetic rearrangements. The term “protein folding” is art-recognized and includes the movement of a polypeptide chain through multiple three-dimensional configurations until the stable, active, three-dimensional configuration is attained. The formation of disulfide bonds and the sequestration of hydrophobic regions from the surrounding aqueous solution provide some of the driving forces for this folding process, and correct folding may be enhanced by the activity of chaperones. The terns “secretion” or “protein secretion” is art-recognized and includes the movement of proteins from the interior of the cell to the exterior of the cell, in a mechanism whereby a system of secretion proteins permits their transit across the cellular membrane to the exterior of the cell.

[0070] In another embodiment, the SES molecules of the invention are capable of modulating the production of a desired molecule, such as a fine chemical, in a microorganism such as C. glutamicum. There are a number of mechanisms by which the alteration of an SES protein of the invention may directly affect the yield, production, and/or efficiency of production of a fine chemical from a C. glutamicum strain incorporating such an altered protein. For example, modulation of proteins involved directly in transcription or translation (e.g., polymerases or ribosomes) such that they are increased in number or in activity should increase global cellular transcription or translation (or rates of these processes). This increased cellular gene expression should include those proteins involved in fine chemical biosynthesis, so an increase in yield, production, or efficiency of production of one or more desired compounds may occur. Modifications to the transcriptional/translational protein machinery of C. glutamicum such that the regulation of these proteins is altered may also permit increased expression of genes involved in the production of fine chemicals. Modulation of the activity or number of proteins involved in polypeptide folding may permit an increase in the overall production of correctly folded molecules in the cell, thereby increasing the possibility that desired proteins (e.g., fine chemical biosynthetic proteins) are able to function properly. Further, by mutating proteins involved in secretion from C. glutamicum such that they are increased in number or activity, it may be possible to increase the secretion of a fine chemical (e.g., an enzyme) from cells in fermentor culture, where it may be readily recovered.

[0071] Genetic modification of the SES molecules of the invention may also result in indirect modulation of production of one or more fine chemicals. For example, by increasing the number or activity of a DNA repair or recombination protein of the invention, one may increase the ability of the cell to detect and repair DNA damage. This should effectively increase the ability of the cell to maintain a mutated gene within its genome, thereby increasing the likelihood that a transgene engineered into C. glutamicum (e.g., encoding a protein which will increase biosynthesis of a fine chemical) will not be lost during culture of the microorganism. Conversely, by decreasing the number or activity of one or more DNA repair or recombination proteins, it may be possible to increase the genetic instability of the organism. Such manipulations should improve the ability of the organism to be modified by mutagenesis without the introduced mutation being corrected. The same holds true for proteins involved in transposition or rearrangement of genetic elements in C. glutamicum (e.g., transposons). By mutagenizing these proteins such that they are either increased or decreased in number or activity, it is possible to simultaneously increase or decrease the genetic stability of the microorganism. This has a profound impact on the ability of any other mutation to be introduced into C. glutamicum, and on the ability of introduced mutations to be retained. Transposons also offer a convenient mechanism by which mutagenesis of C. glutamicum may be performed; duplication of desired genes (e.g., fine chemical biosynthetic genes) is readily accomplished by transposon mutagenesis, as is disruption of undesired genes (e.g., genes encoding proteins involved in degradation of desired fine chemicals).

[0072] By modulating one or more proteins (e.g. sigma factors) involved in the regulation of transcription or translation in response to particular environmental conditions, it may be possible to prevent the cell from slowing or stopping protein synthesis under unfavorable environmental conditions, such as those found in large-scale fermentor culture. This should lead to increased gene expression, which in turn may permit increased biosynthesis of desired fine chemicals under such conditions. Many such secreted proteins have functions critical for cell viability (e.g., cell surface proteases or receptors). An alteration of a secretory pathway such that these proteins are more readily transported to their extracellular location may improve the overall viability of the cell, and thus result in greater numbers of C. glutamicum cells capable of producing fine chemicals during large-scale culture. Further, since certain bacterial protein secretion pathways (e.g., the sec system) are known to participate in the insertion of integral membrane proteins (such as receptors, channels, pores, or transporters) into the membrane, the modulation of activity of proteins involved in protein secretion from C. glutamicum may affect the ability of the cell to excrete waste products or to import necessary metabolites. If the activity of these secretory proteins is increased, then the ability of the cell to produce fine chemicals may be similarly increased (due to an increase in the presence of transporters/channels in the membrane which may import nutrients or excrete waste products). If the activity of these proteins is decreased, then there may be insufficient nutrients available to support overproduction of desired compounds, or waste products may interfere with fine chemical biosynthesis.

[0073] The isolated nucleic acid sequences of the invention are contained within the genome of a Corynebacterium glutamicum strain available through the American Type Culture Collection, given designation ATCC 13032. The nucleotide sequence of the isolated C. glutamicum SES DNAs and the predicted amino acid sequences of the C. glutamicum SES proteins are shown in Appendices A and B, respectively. Computational analyses were performed which classified and/or identified these nucleotide sequences as sequences which encode proteins involved in the repair or recombination of DNA, in the transposition of genetic material, in gene expression (i.e., the processes of transcription or translation), in protein folding, or in protein secretion in Corynebacterium glutamicum.

[0074] The present invention also pertains to proteins which have an amino acid sequence which is substantially homologous to an amino acid sequence of Appendix B. As used herein, a protein which has an amino acid sequence which is substantially homologous to a selected amino acid sequence is least about 50% homologous to the selected amino acid sequence, e.g., the entire selected amino acid sequence. A protein which has an amino acid sequence which is substantially homologous to a selected amino acid sequence can also be least about 50-60%, preferably at least about 60-70%, and more preferably at least about 70-80%, 80-90%, or 90-95%, and most preferably at least about 96%, 97%, 98%, 99% or more homologous to the selected amino acid sequence.

[0075] The SES protein or a biologically active portion or fragment thereof of the invention can participate in the repair or recombination of DNA, in the transposition of genetic material, in gene expression (i.e., the processes of transcription or translation), in protein folding, or in protein secretion in Corynebacterium glutamicum, or have one or more of the activities set forth in Table 1.

[0076] Various aspects of the invention are described in further detail in the following subsections:

A. Isolated Nucleic Acid Molecules

[0077] One aspect of the invention pertains to isolated nucleic acid molecules that encode SES polypeptides or biologically active portions thereof, as well as nucleic acid fragments sufficient for use as hybridization probes or primers for the identification or amplification of SES-encoding nucleic acid (e.g., SES DNA). As used herein, the term “nucleic acid molecule” is intended to include DNA molecules (e.g., CDNA or genomic DNA) and RNA molecules (e.g., mRNA) and analogs of the DNA or RNA generated using nucleotide analogs. This term also encompasses untranslated sequence located at both the 3′ and 5′ ends of the coding region of the gene: at least about 100 nucleotides of sequence upstream from the 5′ end of the coding region and at least about 20 nucleotides of sequence downstream from the 3′ end of the coding region of the gene. The nucleic acid molecule can be single-stranded or double-stranded, but preferably is double-stranded DNA. An “isolated” nucleic acid molecule is one which is separated from other nucleic acid molecules which are present in the natural source of the nucleic acid. Preferably, an “isolated” nucleic acid is free of sequences which naturally flank the nucleic acid (i.e., sequences located at the 5′ and 3′ ends of the nucleic acid) in the genomic DNA of the organism from which the nucleic acid is derived. For example, in various embodiments, the isolated SES nucleic acid molecule can contain less than about 5 kb, 4 kb, 3 kb, 2 kb, 1 kb, 0.5 kb or 0.1 kb of nucleotide sequences which naturally flank the nucleic acid molecule in genomic DNA of the cell from which the nucleic acid is derived (e.g, a C. glutamicum cell). Moreover, an “isolated” nucleic acid molecule, such as a DNA molecule, can be substantially free of other cellular material, or culture medium when produced by recombinant techniques, or chemical precursors or other chemicals when chemically synthesized.

[0078] A nucleic acid molecule of the present invention, e.g., a nucleic acid molecule having a nucleotide sequence of Appendix A, or a portion thereof, can be isolated using standard molecular biology techniques and the sequence information provided herein. For example, a C. glutamicum SES DNA can be isolated from a C. glutamicum library using all or portion of one of the sequences of Appendix A as a hybridization probe and standard hybridization techniques (e.g., as described in Sambrook, J., Fritsh, E. F., and Maniatis, T. Molecular Cloning: A Laboratory ManuaL 2nd, ed., Cold Spring Harbor Laboratory, Cold Spring Harbor- Laboratory Press, Cold Spring Harbor, N.Y., 1989). Moreover, a nucleic acid molecule encompassing all or a portion of one of the sequences of Appendix A can be isolated by the polymerase chain reaction using oligonucleotide primers designed based upon this sequence (e.g., a nucleic acid molecule encompassing all or a portion of one of the sequences of Appendix A can be isolated by the polymerase chain reaction using oligonucleotide primers designed based upon this same sequence of Appendix A). For example, mRNA can be isolated from normal endothelial cells (e.g., by the guanidinium-thiocyanate extraction procedure of Chirgwin et aL (1979) Biochemistry 18: 5294-5299) and DNA can be prepared using reverse transcriptase (e.g., Moloney MLV reverse transcriptase, available from Gibco/BRL, Bethesda, MD; or AMV reverse transcriptase, available from Seikagaku America, Inc., St. Petersburg, Fla.). Synthetic oligonucleotide primers for polymerase chain reaction amplification can be designed based upon one of the nucleotide sequences shown in Appendix A. A nucleic acid of the invention can be amplified using cDNA or, alternatively, genomic DNA, as a template and appropriate oligonucleotide primers according to standard PCR amplification techniques. The nucleic acid so amplified can be cloned into an appropriate vector and characterized by DNA sequence analysis. Furtherrnore, oligonucleotides corresponding to an SES nucleotide sequence can be prepared by standard synthetic techniques, e.g., using an automated DNA synthesizer.

[0079] In a preferred embodiment, an isolated nucleic acid molecule of the invention comprises one of the nucleotide sequences shown in Appendix A. The sequences of Appendix A correspond to the Corynebacterium glutamicum SES DNAs of the invention. This DNA comprises sequences encoding SES proteins (i.e., the “coding region”, indicated in each sequence in Appendix A), as well as 5′ untranslated sequences and 3′ untranslated sequences, also indicated in Appendix A. Alternatively, the nucleic acid molecule can comprise only the coding region of any of the sequences in Appendix A.

[0080] For the purposes of this application, it will be understood that each of the sequences set forth in Appendix A has an identifying RXA, RXN, or RXS number having the designation “RXA”, “RXN”, or “RXS” followed by 5 digits (i.e., RXA01278, RXN01559, or RXS00061). Each of these sequences comprises up to three parts: a 5′ upstream region, a coding region, and a downstream region. Each of these three regions is identified by the same RXA, RXN, or RXS designation to eliminate confusion. The recitation “one of the sequences in Appendix A”, then, refers to any of the sequences in Appendix A, which may be distinguished by their differing RXA, RXN, or RXS designations. The coding region of each of these sequences is translated into a corresponding amino acid sequence, which is set forth in Appendix B. The sequences of Appendix B are identified by the same RXA, RXN, or RXS designations as Appendix A, such that. they can be readily correlated. For example, the amino acid sequences in Appendix B designated RXA01278, RXN01559, and RXS00061 are translations of the coding regions of the nucleotide sequence of nucleic acid molecules RXA01278, RXN01559, and RXS00061 respectively, in Appendix A. Each of the RXA, RXN, and RXS nucleotide and amino acid sequences of the invention has also been assigned a SEQ ID NO, as indicated in Table 1. For example, as set forth in Table 1, the nucleotide sequence of RXN01559 is SEQ ID NO:5, and the amino acid sequence of RXN01559 is SEQ ID NO:6.

[0081] Several of the genes of the invention are “F-designated genes”. An F-designated gene includes those genes set forth in Table 1 which have an ‘F’ in front of the RXA, RXN or RXS designation. For example, SEQ ID NO:7, designated, as indicated on Table 1, as “F RXA00935”, is an F-designated gene, as are SEQ ID NOs: 9, 29, and 37 (designated on Table 1 as “F RXA01559”, “F RXA00484”, and “F RXA01670”, respectively).

[0082] In one embodiment, the nucleic acid molecules of the present invention are not intended to include those compiled in Table 2. In the case of the dapD gene, a sequence for this gene was published in Wehrmann, A., et al.(1998) J. Bacteriol. 180(12): 3159-3165. However, the sequence obtained by the inventors of the present application is significantly longer than the published version. It is believed that the published version relied on an incorrect start codon, and thus represents only a fragment of the actual coding region.

[0083] In another preferred embodiment, an isolated nucleic acid molecule of the invention comprises a nucleic acid molecule which is a complement of one of the nucleotide sequences shown in Appendix A, or a portion thereof. A nucleic acid molecule which is complementary to one of the nucleotide sequences shown in Appendix A is one which is sufficiently complementary to one of the nucleotide sequences shown in Appendix A such that it can hybridize to one of the nucleotide sequences shown in Appendix A, thereby forming a stable duplex.

[0084] In still another preferred embodiment, an isolated nucleic acid molecule of the invention comprises a nucleotide sequence which is at least about 50%, 51%, 52%, 53%, 54%, 55%, 56%, 57%, 58%, 59%, or 60%, preferably at least about 61%, 62%, 63%, 64%, 65%, 66%, 67%, 68%, 69%, or 70%, more preferably at least about 71%, 72%, 73%, 74%, 75%, 76%, 77%, 78%, 79%, or 80%, 81%, 82%, 83%, 84%, 85%, 86%, 87%, 88%, 89%, or 90%, or 91%, 92%, 93%, 94%,and even more preferably at least about 95%, 96%, 97%, 98%, 99% or more homologous to a nucleotide sequence shown in Appendix A, or a portion thereof. Ranges and identity values intermediate to the above-recited ranges, (e.g., 70-90% identical or 80-95% identical) are also intended to be encompassed by the present invention. For example, ranges of identity values using a combination of any of the above values recited as upper and/or lower limits are intended to be included. In an additional preferred embodiment, an isolated nucleic acid molecule of the invention comprises a nucleotide sequence which hybridizes, e.g., hybridizes under stringent conditions, to one of the nucleotide sequences shown in Appendix A, or a portion thereof.

[0085] Moreover, the nucleic acid molecule of the invention can comprise only a portion of the coding region of one of the sequences in Appendix A, for example a fragment which can be used as a probe or primer or a fragment encoding a biologically active portion of an SES protein. The nucleotide sequences determined from the cloning of the SES genes from C. glutamicum allows for the generation of probes and primers designed for use in identifying and/or cloning SES homologues in other cell types and organisms, as well as SES homologues from other Corynebacteria or related species. The probe/primer typically comprises substantially purified oligonucleotide. The oligonucleotide typically comprises a region of nucleotide sequence that hybridizes under stringent conditions to at least about 12, preferably about 25, more preferably about 40, 50 or 75 consecutive nucleotides of a sense strand of one of the sequences set forth in Appendix A, an anti-sense sequence of one of the sequences set forth in Appendix A, or naturally occurring mutants thereof. Primers based on a nucleotide sequence of Appendix A can be used in PCR reactions to clone SES homologues. Probes based on the SES nucleotide sequences can be used to detect transcripts or genomic sequences encoding the same or homologous proteins. In preferred embodiments, the probe further comprises a label group attached thereto, e.g. the label group can be a radioisotope, a fluorescent compound, an enzyme, or an enzyme co-factor. Such probes can be used as a part of a diagnostic test kit for identifying cells which misexpress an SES protein, such as by measuring a level of an SES-encoding nucleic acid in a sample of cells, e.g., detecting SES mRNA levels or determining whether a genomic SES gene has been mutated or deleted.

[0086] In one embodiment, the nucleic acid molecule of the invention encodes a protein or portion thereof which includes an amino acid sequence which is sufficiently homologous to an amino acid sequence of Appendix B such that the protein or portion thereof maintains the ability to participate in the repair or recombination of DNA, in the transposition of genetic material, in gene expression (i.e., the processes of transcription or translation), in protein folding, or in protein secretion in Corynebacterium glutamicum. As used herein, the language “sufficiently homologous” refers to proteins or portions thereof which have amino acid sequences which include a minimum number of identical or equivalent (e.g., an amino acid residue which has a similar side chain as an amino acid residue in one of the sequences of Appendix B) amino acid residues to an amino acid sequence of Appendix B such that the protein or portion thereof is able to participate in the repair or recombination of DNA, in the transposition of genetic material, in gene expression (i e., the processes of transcription or translation), in protein folding, or in protein secretion in Corynebacterium glutamicum. Proteins involved in C. glutamicum genetic stability, gene expression, protein folding or protein secretion, as described herein, may play a role in the production and secretion of one or more fine chemicals. Examples of such activities are also described herein. Thus, “the function of an SES protein” contributes either directly or indirectly to the yield, production, and/or efficiency of production of one or more fine chemicals. Examples of SES protein activities are set forth in Table 1.

[0087] In another embodiment, the protein is at least about 50-60%, preferably at least about 60-70%, and more preferably at least about 70-80%, 80-90%, 90-95%, and most preferably at least about 96%, 97%, 98%, 99% or more homologous to an entire amino acid sequence of Appendix B.

[0088] Portions of proteins encoded by the SES nucleic acid molecules of the invention are preferably biologically active portions of one of the SES proteins. As used herein, the term “biologically active portion of an SES protein” is intended to include a portion, e.g., a domain/motif, of an SES protein that participate in the repair or recombination of DNA, in the transposition of genetic material, in gene expression (i.e., the processes of transcription or translation), in protein folding, or in protein secretion in Corynebacterium glutamicum, or has an activity as set forth in Table 1. To determine whether an SES protein or a biologically active portion thereof can participate in the repair or recombination of DNA, in the transposition of genetic material, in gene expression (i.e., the processes of transcription or translation), in protein folding, or in protein secretion in Corynebacterium glutamicum, an assay of enzymatic activity may be performed. Such assay methods are well known to those of ordinary skill in the art, as detailed in Example 8 of the Exemplification.

[0089] Additional nucleic acid fragments encoding biologically active portions of an SES protein can be prepared by isolating a portion of one of the sequences in Appendix B, expressing the encoded portion of the SES protein or peptide (e.g., by recombinant expression in vitro) and assessing the activity of the encoded portion of the SES protein or peptide.

[0090] The invention further encompasses nucleic acid molecules that differ from one of the nucleotide sequences shown in Appendix A (and portions thereof) due to degeneracy of the genetic code and thus encode the same SES protein as that encoded by the nucleotide sequences shown in Appendix A. In another embodiment, an isolated nucleic acid molecule of the invention has a nucleotide sequence encoding a protein having an amino acid sequence shown in Appendix B. In a still further embodiment, the nucleic acid molecule of the invention encodes a full length C. glutamicum protein which is substantially homologous to an amino acid sequence of Appendix B (encoded by an open reading frame shown in Appendix A).

[0091] It will be understood by one of ordinary skill in the art that in one embodiment the sequences of the invention are not meant to include the sequences of the prior art, such as those Genbank sequences set forth in Tables 2 or 4 which were available prior to the present invention. In one embodiment, the invention includes nucleotide and amino acid sequences having a percent identity to a nucleotide or amino acid sequence of the invention which is greater than that of a sequence of the prior art (e.g., a Genbank sequence (or the protein encoded by such a sequence) set forth in Tables 2 or 4). For example, the invention includes a nucleotide sequence which is greater than and/or at least 71% identical to the nucleotide sequence designated RXA01278 (SEQ ID NO:1), a nucleotide sequence which is greater than and/or at least 38% identical to the nucleotide sequence designated RXA01020 (SEQ ID NO:25), and a nucleotide sequence which is greater than and/or at least 54% identical to the nucleotide sequence designated RXA02078 (SEQ ID NO:39). One of ordinary skill in the art would be able to calculate the lower threshold of percent identity for any given sequence of the invention by examining the GAP-calculated percent identity scores set forth in Table 4 for each of the three top hits for the given sequence, and by subtracting the highest GAP-calculated percent identity from 100 percent. One of ordinary skill in the art will also appreciate that nucleic acid and amino acid sequences having percent identities greater than the lower threshold so calculated (e.g., at least 50%, 51%, 52%, 53%, 54%, 55%, 56%, 57%, 58%, 59%, or 60%, preferably at least about 61%, 62%, 63%, 64%, 65%, 66%, 67%, 68%, 69%, or 70%, more preferably at least about 71%, 72%, 73%, 74%, 75%, 76%, 77%, 78%, 79%, or 80%, 81%, 82%, 83%, 84%, 85%, 86%, 87%, 88%, 89%, or 90%, or 91%, 92%, 93%, 94%, and even more preferably at least about 95%, 96%, 97%, 98%, 99% or more identical) are also encompassed by the invention.

[0092] In addition to the C. glutamicum SES nucleotide sequences shown in Appendix A, it will be appreciated by those of ordinary skill in the art that DNA sequence polymorphisms that lead to changes in the amino acid sequences of SES proteins may exist within a population (e.g., the C. glutamicum population). Such genetic polymorphism in the SES gene may exist among individuals within a population due to natural variation. As used herein, the terms “gene” and “recombinant gene” refer to nucleic acid molecules comprising an open reading frame encoding an SES protein, preferably a C. glutamicum SES protein. Such natural variations can typically result in 1-5% variance in the nucleotide sequence of the SES gene. Any and all. such nucleotide variations and resulting amino acid polymorphisms in SES that are the result of natural variation and that do not alter the functional activity of SES proteins are intended to be within the scope of the invention.

[0093] Nucleic acid molecules corresponding to natural variants and non-C. glutamicum homologues of the C. glutamicum SES DNA of the invention can be isolated based on their homology to the C. glutamicum SES nucleic acid disclosed herein using the C. glutamicum DNA, or a portion thereof, as a hybridization probe according to standard hybridization techniques under stringent hybridization conditions. Accordingly, in another embodiment, an isolated nucleic acid molecule of the invention is at least 15 nucleotides in length and hybridizes under stringent conditions to the nucleic acid molecule comprising a nucleotide sequence of Appendix A. In other embodiments, the nucleic acid is at least 30, 50, 100, 250 or more nucleotides in length. As used herein, the term “hybridizes under stringent conditions” is intended to describe conditions for hybridization and washing under which nucleotide sequences at least 60% homologous to each other typically remain hybridized to each other. Preferably, the conditions are such that sequences at least about 65%, more preferably at least about 70%, and even more preferably at least about 75% or more homologous to each other typically remain hybridized to each other. Such stringent conditions are known to those of ordinary skill in the art and can be found in Current Protocols in Molecular Biology, John Wiley & Sons, N.Y. (1989), 6.3.1-6.3.6. A preferred, non-limiting example of stringent hybridization conditions are hybridization in 6× sodium chloride/sodium citrate (SSC) at about 45° C., followed by one or more washes in 0.2×SSC, 0.1% SDS at 50-65° C. Preferably, an isolated nucleic acid molecule of the invention that hybridizes under stringent conditions to a sequence of Appendix A corresponds to a naturally-occurring nucleic acid molecule. As used herein, a “naturally-occurring” nucleic acid molecule refers to an RNA or DNA molecule having a nucleotide sequence that occurs in nature (e.g., encodes a natural protein). In one embodiment, the nucleic acid encodes a natural C. glutamicum SES protein.

[0094] In addition to naturally-occurring variants of the SES sequence that may exist in the population, one of ordinary skill in the art will further appreciate that changes can be introduced by mutation into a nucleotide sequence of Appendix A, thereby leading to changes in the amino acid sequence of the encoded SES protein, without altering the functional ability of the SES protein. For example, nucleotide substitutions leading to amino acid substitutions at “non-essential” amino acid residues can be made in a sequence of Appendix A. A “non-essential” amino acid residue is a residue that can be altered from the wild-type sequence of one of the SES proteins (Appendix B) without altering the activity of said SES protein, whereas an “essential” amino acid residue is required for SES protein activity. Other amino acid residues, however, (e.g., those that are not conserved or only semi-conserved in the domain having SES activity) may not be essential for activity and thus are likely to be amenable to alteration without altering SES activity.

[0095] Accordingly, another aspect of the invention pertains to nucleic acid molecules encoding SES proteins that contain changes in amino acid residues that are not essential for SES activity. Such SES proteins differ in amino acid sequence from a sequence contained in Appendix B yet retain at least one of the SES activities described herein. In one embodiment, the isolated nucleic acid molecule comprises a nucleotide sequence encoding a protein, wherein the protein comprises an amino acid sequence at least about 50% homologous to an amino acid sequence of Appendix B and is capable of participating in the repair or recombination of DNA, in the transposition of genetic material, in gene expression (i.e., the processes of transcription or translation), in protein folding, or in protein secretion in Corynebacterium glutamicum, or has one or more activities set forth in Table 1. Preferably, the protein encoded by the nucleic acid molecule is at least about 50-60% homologous to one of the sequences in Appendix B, more preferably at least about 60-70% homologous to one of the sequences in Appendix B, even more preferably at least about 70-80%, 80-90%, 90-95% homologous to one of the sequences in Appendix B, and most preferably at least about 96%, 97%, 98%, or 99% homologous to one of the sequences in Appendix B.

[0096] To determine the percent homology of two amino acid sequences (e.g., one of the sequences of Appendix B and a mutant form thereof) or of two nucleic acids, the sequences are aligned for optimal comparison purposes (e.g., gaps can be introduced in the sequence of one protein or nucleic acid for optimal alignment with the other protein or nucleic acid). The amino acid residues or nucleotides at corresponding amino acid positions or nucleotide positions are then compared. When a position in one sequence (e.g., one of the sequences of Appendix B) is occupied by the same amino acid residue or nucleotide as the corresponding position in the other sequence (e.g., a mutant form of the sequence selected from Appendix B), then the molecules are homologous at that position (i.e., as used herein amino acid or nucleic acid “homology” is equivalent to amino acid or nucleic acid “identity”). The percent homology between the two sequences is a function of the number of identical positions shared by the sequences (i.e., % homology=# of identical positions/total # of positions×100).

[0097] An isolated nucleic acid molecule encoding an SES protein homologous to a protein sequence of Appendix B can be created by introducing one or more nucleotide substitutions, additions or deletions into a nucleotide sequence of Appendix A such that one or more amino acid substitutions, additions or deletions are introduced into the encoded protein. Mutations can be introduced into one of the sequences of Appendix A by standard techniques, such as site-directed mutagenesis and PCR-mediated mutagenesis. Preferably, conservative amino acid substitutions are made at one or more predicted non-essential amino acid residues. A “conservative amino acid substitution” is one in which the amino acid residue is replaced with an amino acid residue having a similar side chain. Families of amino acid residues having similar side chains have been defined in the art. These families include amino acids with basic side chains (e.g., lysine, arginine, histidine), acidic side chains (e.g., aspartic acid, glutamic acid), uncharged polar side chains (e.g., glycine, asparagine, glutamine, serine, threonine, tyrosine, cysteine), nonpolar side chains (e.g., alanine, valine, leucine, isoleucine, proline, phenylalanine, methionine, tryptophan), beta-branched side chains (e.g, threonine, valine, isoleucine) and aromatic side chains (e.g., tyrosine, phenylalanine, tryptophan, histidine). Thus, a predicted nonessential amino acid residue in an SES protein is preferably replaced with another amino acid residue from the same side chain family. Alternatively, in another embodiment, mutations can be introduced randomly along all or part of an SES coding sequence, such as by saturation mutagenesis, and the resultant mutants can be screened for an SES activity described herein to identify mutants that retain SES activity. Following mutagenesis of one of the sequences of Appendix A, the encoded protein can be expressed recombinantly and the activity of the protein can be determined using, for example, assays described herein (see Example 8 of the Exemplification).

[0098] In addition to the nucleic acid molecules encoding SES proteins described above, another aspect of the invention pertains to isolated nucleic acid molecules which are antisense thereto. An “antisense” nucleic acid comprises a nucleotide sequence which is complementary to a “sense” nucleic acid encoding a protein, e.g., complementary to the coding strand of a double-stranded DNA molecule or complementary to an mRNA sequence. Accordingly, an antisense nucleic acid can hydrogen bond to a sense nucleic acid. The antisense nucleic acid can be complementary to an entire SES coding strand, or to only a portion thereof. In one embodiment, an antisense nucleic acid molecule is antisense to a “coding region” of the coding strand of a nucleotide sequence encoding an SES protein. The term “coding region” refers to the region of the nucleotide sequence comprising codons which are translated into amino acid residues (e.g., the entire coding region of SEQ ID NO. 1 (RXA01278) comprises nucleotides 1 to 2127). In another embodiment, the antisense nucleic acid molecule is antisense to a “noncoding region” of the coding strand of a nucleotide sequence encoding SES. The term “noncoding region” refers to 5′ and 3′ sequences which flank the coding region that are not translated into amino acids (i.e., also referred to as 5′ and 3′ untranslated regions).

[0099] Given the coding strand sequences encoding SES disclosed herein (e.g., the sequences set forth in Appendix A), antisense nucleic acids of the invention can be designed according to the rules of Watson and Crick base pairing. The antisense nucleic acid molecule can be complementary to the entire coding region of SES mRNA, but more preferably is an oligonucleotide which is antisense to only a portion of the coding or noncoding region of SES mRNA. For example, the antisense oligonucleotide can be complementary to the region surrounding the translation start site of SES mRNA. An antisense oligonucleotide can be, for example, about 5, 10, 15, 20, 25, 30, 35, 40, 45 or 50 nucleotides in length. An antisense nucleic acid of the invention can be constructed using chemical synthesis and enzymatic ligation reactions using procedures known in the art. For example, an antisense nucleic acid (e.g., an antisense oligonucleotide) can be chemically synthesized using naturally occurring nucleotides or variously modified nucleotides designed to increase the biological stability of the molecules or to increase the physical stability of the duplex formed between the antisense and sense nucleic acids, e.g., phosphorothioate derivatives and acridine substituted nucleotides can be used. Examples of modified nucleotides which can be used to generate the antisense nucleic acid include 5-fluorouracil, 5-bromouracil, 5-chlorouracil, 5-iodouracil, hypoxanthine, xanthine, 4-acetylcytosine, 5-(carboxyhydroxylmethyl) uracil, 5-carboxymethylaminomethyl-2-thiouridine, 5-carboxymethylaminomethyluracil, dihydrouracil, beta-D-galactosylqueosine, inosine, N6-isopentenyladenine, 1-methylguanine, 1-methylinosine, 2,2-dimethylguanine, 2-methyladenine, 2-methylguanine, 3-methylcytosine, 5-methylcytosine, N6-adenine, 7-methylguanine, 5-methylaminomethyluracil, 5-methoxyaminomethyl-2-thiouracil, beta-D-mannosylqueosine, 5′-methoxycarboxymethyluracil, 5-methoxyuracil, 2-methylthio-N6-isopentenyladenine, uracil-5-oxyacetic acid (v), wybutoxosine, pseudouracil, queosine, 2-thiocytosine, 5-methyl-2-thiouracil, 2-thiouracil, 4-thiouracil, 5-methyluracil, uracil-5-oxyacetic acid methylester, uracil-5-oxyacetic acid (v), 5-methyl-2-thiouracil, 3-(3-amino-3-N-2-carboxypropyl) uracil, (acp3)w, and 2,6-diaminopurine. Alternatively, the antisense nucleic acid can be produced biologically using an expression vector into which a nucleic acid has been subcloned in an antisense orientation (i.e., RNA transcribed from the inserted nucleic acid will be of an antisense orientation to a target nucleic acid of interest, described further in the following subsection).

[0100] The antisense nucleic acid molecules of the invention are typically administered to a cell or generated in situ such that they hybridize with or bind to cellular mRNA and/or genomic DNA encoding an SES protein to thereby inhibit expression of the protein, e.g., by inhibiting transcription and/or translation. The hybridization can be by conventional nucleotide complementarity to form a stable duplex, or, for example, in the case of an antisense nucleic acid molecule which binds to DNA duplexes, through specific interactions in the major groove of the double helix. The antisense molecule can be modified such that it specifically binds to a receptor or an antigen expressed on a selected cell surface, e.g., by linking the antisense nucleic acid molecule to a peptide or an antibody which binds to a cell surface receptor or antigen. The antisense nucleic acid molecule can also be delivered to cells using the vectors described herein. To achieve sufficient intracellular concentrations of the antisense molecules, vector constructs in which the antisense nucleic acid molecule is placed under the control of a strong prokaryotic, viral, or eukaryotic promoter are preferred.

[0101] In yet another embodiment, the antisense nucleic acid molecule of the invention is an o-anomeric nucleic acid molecule. An α-anomeric nucleic acid molecule forms specific double-stranded hybrids with complementary RNA in which, contrary to the usual P-units, the strands run parallel to each other (Gaultier et al.(1987) Nucleic Acids. Res. 15:6625-6641). The antisense nucleic acid molecule can also comprise a 2′-o-methylribonucleotide (Inoue etal.(1987) Nucleic Acids Res. 15:6131-6148) ora chimeric RNA-DNA analogue (Inoue et al. (1987) FEBS Lett. 215:327-330).

[0102] In still another embodiment, an antisense nucleic acid of the invention is a ribozyme. Ribozymes are catalytic RNA molecules with ribonuclease activity which are capable of cleaving a single-stranded nucleic acid, such as an mRNA, to which they have a complementary region. Thus, ribozymes (e.g., hammerhead ribozymes (described in Haselhoff and Gerlach (1988) Nature 334:585-591)) can be used to catalytically cleave SES mRNA transcripts to thereby inhibit translation of SES mRNA. A ribozyme having specificity for an SES-encoding nucleic acid can be designed based upon the nucleotide sequence of an SES DNA disclosed herein (i.e., SEQ ID NO. 1 (RXA01278 in Appendix A)). For example, a derivative of a Tetrahymena L-19 IVS RNA can be constructed in which the nucleotide sequence of the active site is complementary to the nucleotide sequence to be cleaved in an SES-encoding mRNA. See, e.g., Cech et al U.S. Pat. No. 4,987,071 and Cech et al. U.S. Pat. No. 5,116,742. Alternatively, SES mRNA can be used to select a catalytic RNA having a specific ribonuclease activity from a pool of RNA molecules. See, e.g., Bartel, D. and Szostak, J. W. (1993) Science 261:1411-1418.

[0103] Alternatively, SES gene expression can be inhibited by targeting nucleotide sequences complementary to the regulatory region of an SES nucleotide sequence (e.g., an SES promoter and/or enhancers) to form triple helical structures that prevent transcription of an SES gene in target cells. See generally, Helene, C. (1991) Anticancer Drug Des. 6(6):569-84; Helene, C. et al.(1992) Ann. N.Y Acad. Sci. 660:27-36; and Maher, L. J. (1992) Bioassays 14(12):807-15.

B. Recombinant Expression Vectors and Host Cells

[0104] Another aspect of the invention pertains to vectors, preferably expression vectors, containing a nucleic acid encoding an SES protein (or a portion thereof). As used herein, the term “vector” refers to a nucleic acid molecule capable of transporting another nucleic acid to which it has been linked. One type of vector is a “plasmid”, which refers to a circular double stranded DNA loop into which additional DNA segments can be ligated. Another type of vector is a viral vector, wherein additional DNA segments can be ligated into the viral genome. Certain vectors are capable of autonomous replication in a host cell into which they are introduced (e.g., bacterial vectors having a bacterial origin of replication and episomal mammalian vectors). Other vectors (e.g., non-episomal mammalian vectors) are integrated into the genome of a host cell upon introduction into the host cell, and thereby are replicated along with the host genome. Moreover, certain vectors are capable of directing the expression of genes to which they are operatively linked. Such vectors are referred to herein as “expression vectors”. In general, expression vectors of utility in recombinant DNA techniques are often in the form of plasmids. In the present specification, “plasmid” and “vector” can be used interchangeably as the plasmid is the most commonly used form of vector. However, the invention is intended to include such other forms of expression vectors, such as viral vectors (e.g., replication defective retroviruses, adenoviruses and adeno-associated viruses), which serve equivalent functions.

[0105] The recombinant expression vectors of the invention comprise a nucleic acid of the invention in a form suitable for expression of the nucleic acid in a host cell, which means that the recombinant expression vectors include one or more regulatory sequences, selected on the basis of the host cells to be used for expression, which are operatively linked to the nucleic acid sequence to be expressed. Within a recombinant expression vector, “operably linked” is intended to mean that the nucleotide sequence of interest is linked to the regulatory sequence(s) in a manner which allows for expression of the nucleotide sequence (e.g., in an in vitro transcription/translation system or in a host cell when the vector is introduced into the host cell). The term “regulatory sequence” is intended to include promoters, enhancers and other expression control elements (e.g., polyadenylation signals). Such regulatory sequences are described, for example, in Goeddel; Gene Expression Technology: Methods in Enzymology 185, Academic Press, San Diego, Calif. (1990). Regulatory sequences include those which direct constitutive expression of a nucleotide sequence in many types of host cell and those which direct expression of the nucleotide sequence only in certain host cells. Preferred regulatory sequences are, for example, promoters such as cos-, tac-, trp-, tet-, trp-tet-, 1pp-, 1ac-, 1pp-lac-, 1acI^{q}-, T7-, T5-, T3-, gal-, trc-, ara-, SP6-, arny, SPO2, λ-P_{R}- or λP_{L}, which are used preferably in bacteria. Additional regulatory sequences are, for example, promoters from yeasts and fungi, such as ADC1, MFα, AC, P-60, CYC1, GAPDH, TEF, rp28, ADH, promoters from plants such as CaMV/35S, SSU, OCS, lib4, usp, STLS1, B33, nos or ubiquitin- or phaseolin-promoters. It is also possible to use artificial promoters. It will be appreciated by one of ordinary skill in the art that the design of the expression vector can depend on such factors as the choice of the host cell to be transformed, the level of expression of protein desired, etc. The expression vectors of the invention can be introduced into host cells to thereby produce proteins or peptides, including fusion proteins or peptides, encoded by nucleic acids as described herein (e.g., SES proteins, mutant forms of SES proteins, fusion proteins, etc.).

[0106] The recombinant expression vectors of the invention can be designed for expression of SES proteins in prokaryotic or eukaryotic cells. For example, SES genes can be expressed in bacterial cells such as C. glutamicum, insect cells (using baculovirus expression vectors), yeast and other fungal cells (see Romanos, M. A. et al.(1992) “Foreign gene expression in yeast: a review”, Yeast 8: 423-488; van den Hondel, C.A.M.J.J. et al.(1991) “Heterologous gene expression in filamentous fungi” in: More Gene Manipulations in Fungi, J. W. Bennet & L. L. Lasure, eds., p.396-428: Academic Press: San Diego; and van den Hondel, C.A.M.J.J. & Punt, P. J. (1991) “Gene transfer systems and vector development for filamentous fungi, in: Applied Molecular Genetics of Fungi, Peberdy, J. F. et al., eds., p. 1-28, Cambridge University Press: Cambridge), algae and multicellular plant cells (see Schmidt, R. and Willmitzer, L. (1988) High efficiency Agrobacterium tumefaciens—mediated transformation of Arabidopsis thaliana leaf and cotyledon explants” Plant Cell Rep.: 583-586), or mammalian cells. Suitable host cells are discussed further in Goeddel, Gene Expression Technology. Methods in Enzymology 185, Academic Press, San Diego, Calif. (1990). Alternatively, the recombinant expression vector can be transcribed and translated in vitro, for example using T7 promoter regulatory sequences and T7 polymerase.

[0107] Expression of proteins in prokaryotes is most often carried out with vectors containing constitutive or inducible promoters directing the expression of either fusion or non-fusion proteins. Fusion vectors add a number of amino acids to a protein encoded therein, usually to the amino terminus of the recombinant protein but also to the C-terminus or fused within suitable regions in the proteins. Such fusion vectors typically serve three purposes: 1) to increase expression of recombinant protein; 2) to increase the solubility of the recombinant protein; and 3) to aid in the purification of the recombinant protein by acting as a ligand in affinity purification. Often, in fusion expression vectors, a proteolytic cleavage site is introduced at the junction of the fusion moiety and the recombinant protein to enable separation of the recombinant protein from the fusion moiety subsequent to purification of the fusion protein. Such enzymes, and their cognate recognition sequences, include Factor Xa, thrombin and enterokinase.

[0108] Typical fusion expression vectors include pGEX (Pharmacia Biotech Inc; Smith, D. B. and Johnson, K. S. (1988) Gene 67:31-40), pMAL (New England Biolabs, Beverly, MA) and pRIT5 (Pharmacia, Piscataway, NJ) which fuse glutathione S-transferase (GST), maltose E binding protein, or protein A, respectively, to the target recombinant protein. In one embodiment, the coding sequence of the SES protein is cloned into a pGEX expression vector to create a vector encoding a fusion protein comprising, from the N-terminus to the C-terminus, GST-thrombin cleavage site-X protein. The fusion protein can be purified by affinity chromatography using glutathione-agarose resin. Recombinant SES protein unfused to GST can be recovered by cleavage of the fusion protein with thrombin.

[0109] Examples of suitable inducible non-fusion E. coli expression vectors include pTrc (Amann et al., (1988) Gene 69:301-315) pLG338, pACYC184, pBR322, pUC18, pUC19, pKC30, pRep4, pHS1, pHS2, pPLc236, pMBL24, pLG200, pUR290, pIN-III113-B1, λgt11, pBdCl, and pET 11d (Studier et al., Gene Expression Technology: Methods in Enzymology 185, Academic Press, San Diego, Calif. (1990) 60-89; and Pouwels et al., eds. (1985) Cloning Vectors. Elsevier: New York IBSN 0 444 904018). Target gene expression from the pTrc vector relies on host RNA polymerase transcription from a hybrid trp-lac fusion promoter. Target gene expression from the pET 11d vector relies on transcription from a T7 gn10-lac fusion promoter mediated by a coexpressed viral RNA polymerase (T7 gn1). This viral polymerase is supplied by host strains BL21(DE3) or HMS174(DE3) from a resident λ prophage harboring a T7 gn1 gene under the transcriptional control of the lacUV 5 promoter. For transformation of other varieties of bacteria, appropriate vectors may be selected. For example, the plasmids pIJ101, pIJ364, pIJ702 and pIJ361 are known to be useful in transforming Streptomyces, while plasmids pUB110, pC194, or pBD214 are suited for transforrnation of Bacillus species. Several plasmids of use in the transfer of genetic information into Corynebacterium include pHM 1519, pBL1, pSA77, or pAJ667 (Pouwels et al., eds. (1985) Cloning Vectors. Elsevier: New York IBSN 0 444 904018). One strategy to maximize recombinant protein expression is to express the protein in a host bacteria with an impaired capacity to proteolytically cleave the recombinant protein (Gottesman, S., Gene Expression Technology: Methods in Enzymology 185, Academic Press, San Diego, Calif. (1990) 119-128). Another strategy is to alter the nucleic acid sequence of the nucleic acid to be inserted into an expression vector so that the individual codons for each amino acid are those preferentially utilized in the bacterium chosen for expression, such as C. glutamicum (Wada et al.(1992) Nucleic Acids Res. 20: 2111-2118). Such alteration of nucleic acid sequences of the invention can be carried out by standard DNA synthesis techniques.

[0110] In another embodiment, the SES protein expression vector is a yeast expression vector. Examples of vectors for expression in yeast S cerevisiae include pYepSec1 (Baldari, et al., (1987) Embo J. 6:229-234, 2 μ, pAG-1, Yep6, Yep13, pEMBLYe23, pMFa (Kurjan and Herskowitz, (1982) Cell 30:933-943), pJRY88 (Schultz et al., (1987) Gene 54:113-123), and pYES2 (Invitrogen Corporation, San Diego, Calif.). Vectors and methods for the construction of vectors appropriate for use in other fungi, such as the filamentous fungi, include those detailed in: van den Hondel, C.A.M.J.J. & Punt, P. J. (1991) “Gene transfer systems and vector development for filamentous fungi, in: Applied Molecular Genetics of Fungi, J. F. Peberdy, et al., eds., p. 1-28, Cambridge University Press: Cambridge, and Pouwels et al., eds. (1985) Cloning Vectors. Elsevier: New York (IBSN 0 444 904018).

[0111] Alternatively, the SES proteins of the invention can be expressed in insect cells using baculovirus expression vectors. Baculovirus vectors available for expression of proteins in cultured insect cells (e.g., Sf 9 cells) include the pAc series (Smith et al.(1983) Mol. Cell Biol. 3:2156-2165) and the pVL series (Lucklow and Summers (1989) Virology 170:31-39).

[0112] In another embodiment, the SES proteins of the invention may be expressed in unicellular plant cells (such as algae) or in plant cells from higher plants (e.g., the spermatophytes, such as crop plants). Examples of plant expression vectors include those detailed in: Becker, D., Kemper, E., Schell, J. and Masterson, R. (1992) “New plant binary vectors with selectable markers located proximal to the left border”, Plant Mol. Biol. 20: 1195-1197; and Bevan, M. W. (1984) “Binary Agrobacterium vectors for plant transformation”, Nucl. Acid. Res. 12: 8711-8721, and include pLGV23, pGHlac+, pBIN19, pAK2004, and pDH51 (Pouwels et al., eds. (1985) Cloning Vectors. Elsevier: New York IBSN 0 444 904018).

[0113] In yet another embodiment, a nucleic acid of the invention is expressed in mammalian cells using a mammalian expression vector. Examples of mammalian expression vectors include pCDM8 (Seed, B. (1987) Nature 329:840) and pMT2PC (Kaufman et al.(1987) EMBO J. 6:187-195). When used in mammalian cells, the expression vector's control functions are often provided by viral regulatory elements. For example, commonly used promoters are derived from polyoma, Adenovirus 2, cytomegalovirus and Simian Virus 40. For other suitable expression systems for both prokaryotic and eukaryotic cells see chapters 16 and 17 of Sambrook, J., Fritsh, E. F., and Maniatis, T. Molecular Cloning: A Laboratory Manual. 2nd, ed, Cold Spring Harbor Laboratory, Cold Spring Harbor Laboratory Press, Cold Spring Harbor, N.Y., 1989.

[0114] In another embodiment, the recombinant mammalian expression vector is capable of directing expression of the nucleic acid preferentially in a particular cell type (e.g., tissue-specific regulatory elements are used to express the nucleic acid). Tissue-specific regulatory elements are known in the art. Non-limiting examples of suitable tissue-specific promoters include the albumin promoter (liver-specific; Pinkert et al.(1987) Genes Dev. 1:268-277), lymphoid-specific promoters (Calame and Eaton (1988) Adv. Immunol. 43:235-275), in particular promoters of T cell receptors (Winoto and Baltimore (1989) EMBO J. 8:729-733) and immunoglobulins (Banerji et al. (1983) Cell 33:729-740; Queen and Baltimore (1983) Cell 33:741-748), neuron-specific promoters (e.g., the neurofilament promoter; Byrne and Ruddle (1989) PNAS 86:5473-5477), pancreas-specific promoters (Edlund et al.(1985) Science 230:912-916), and mammary gland-specific promoters (e.g., milk whey promoter; U.S. Pat. No. 4,873,316 and European Application Publication No. 264,166). Developmentally-regulated promoters are also encompassed, for example the murine hox promoters (Kessel and Gruss (1990) Science 249:374-379) and the cc-fetoprotein promoter (Campes and Tilghman (1989) Genes Dev. 3:537-546).

[0115] The invention further provides a recombinant expression vector comprising a DNA molecule of the invention cloned into the expression vector in an antisense orientation. That is, the DNA molecule is operatively linked to a regulatory sequence in a manner which allows for expression (by transcription of the DNA molecule) of an RNA molecule which is antisense to SES mRNA. Regulatory sequences operatively linked to a nucleic acid cloned in the antisense orientation can be chosen which direct the continuous expression of the antisense RNA molecule in a variety of cell types, for instance viral promoters and/or enhancers, or regulatory sequences can be chosen which direct constitutive, tissue specific or cell type specific expression of antisense RNA. The antisense expression vector can be in the form of a recombinant plasmid, phagemid or attenuated virus in which antisense nucleic acids are produced under the control of a high efficiency regulatory region, the activity of which can be determined by the cell type into which the vector is introduced. For a discussion of the regulation of gene expression using antisense genes see Weintraub, H. et al., Antisense RNA as a molecular tool for genetic analysis, Reviews—Trends in Genetics, Vol. 1(1) (1986).

[0116] Another aspect of the invention pertains to host cells into which a recombinant expression vector of the invention has been introduced. The terms “host cell” and “recombinant host cell” are used interchangeably herein. It is understood that such terms refer not only to the particular subject cell but to the progeny or potential progeny of such a cell. Because certain modifications may occur in succeeding generations due to either mutation or environmental influences, such progeny may not, in fact, be identical to the parent cell, but are still included within the scope of the term as used herein.

[0117] A host cell can be any prokaryotic or eukaryotic cell. For example, an SES protein can be expressed in bacterial cells such as C. glutamicum, insect cells, yeast or mammalian cells (such as Chinese hamster ovary cells (CHO) or COS cells). Other suitable host cells are known to one of ordinary skill in the art. Microorganisms related to Corynebacterium glutamicum which may be conveniently used as host cells for the nucleic acid and protein molecules of the invention are set forth in Table 3.

[0118] Vector DNA can be introduced into prokaryotic or eukaryotic cells via conventional transformation or transfection techniques. As used herein, the terms “transformation” and “transfection”, “conjugation” and “transduction” are intended to refer to a variety of art-recognized techniques for introducing foreign nucleic acid (e.g., linear DNA or RNA (e.g., a linearized vector or a gene construct alone without a vector) or nucleic acid in the form of a vector (e.g., a plasmid, phage, phasmid, phagemid, transposon or other DNA) into a host cell, including calcium phosphate or calcium chloride co-precipitation, DEAE-dextran-mediated transfection, lipofection, natural competence, chemical-mediated transfer, or electroporation. Suitable methods for transforming or transfecting host cells can be found in Sambrook, et al. (Molecular Cloning: A Laboratory Manual. 2nd, ed, Cold Spring Harbor Laboratory, Cold Spring Harbor Laboratory Press, Cold Spring Harbor, N.Y., 1989), and other laboratory manuals.

[0119] For stable transfection of mammalian cells, it is known that, depending upon the expression vector and transfection technique used, only a small fraction of cells may integrate the foreign DNA into their genome. In order to identify and select these integrants, a gene that encodes a selectable marker (e.g., resistance to antibiotics) is generally introduced into the host cells along with the gene of interest. Preferred selectable markers include those which confer resistance to drugs, such as G418, hygromycin and methotrexate. Nucleic acid encoding a selectable marker can be introduced into a host cell on the same vector as that encoding an SES protein or can be introduced on a separate vector. Cells stably transfected with the introduced nucleic acid can be identified by, for example, drug selection (e.g., cells that have incorporated the selectable marker gene will survive, while the other cells die).

[0120] To create a homologous recombinant microorganism, a vector is prepared which contains at least a portion of an SES gene into which a deletion, addition or substitution has been introduced to thereby alter, e.g., functionally disrupt, the SES gene. Preferably, this SES gene is a Corynebacterium glutamicum SES gene, but it can be a homologue from a related bacterium or even from a mammalian, yeast, or insect source. In a preferred embodiment, the vector is designed such that, upon homologous recombination, the endogenous SES gene is functionally disrupted (i.e., no longer encodes a functional protein; also referred to as a “knock out” vector). Alternatively, the vector can be designed such that, upon homologous recombination, the endogenous SES gene is mutated or otherwise altered but still encodes functional protein (e.g., the upstream regulatory region can be altered to thereby alter the expression of the endogenous SES protein). In the homologous recombination vector, the altered portion of the SES gene is flanked at its 5′ and 3′ ends by additional nucleic acid of the SES gene to allow for homologous recombination to occur between the exogenous SES gene carried by the vector and an endogenous SES gene in a microorganism. The additional flanking SES nucleic acid is of sufficient length for successful homologous recombination with the endogenous gene. Typically, several kilobases of flanking DNA (both at the 5′ and 3′ ends) are included in the vector (see e.g., Thomas, K. R., and Capecchi, M. R. (1987) Cell 51: 503 for a description of homologous recombination vectors). The vector is introduced into a microorganism (e.g., by electroporation) and cells in which the introduced SES gene has homologously recombined with the endogenous SES gene are selected, using art-known techniques.

[0121] In another embodiment, recombinant microorganisms can be produced which contain selected systems which allow for regulated expression of the introduced gene. For example, inclusion of an SES gene on a vector placing it under control of the lac operon permits expression of the SES gene only in the presence of IPTG. Such regulatory systems are well known in the art.

[0122] In another embodiment, an endogenous SES gene in a host cell is disrupted (e.g., by homologous recombination or other genetic means known in the art) such that expression of its protein product does not occur. In another embodiment, an endogenous or introduced SES gene in a host cell has been altered by one or more point mutations, deletions, or inversions, but still encodes a functional SES protein. In still another embodiment, one or more of the regulatory regions (e.g., a promoter, repressor, or inducer) of an SES gene in a microorganism has been altered (e.g., by deletion, truncation, inversion, or point mutation) such that the expression of the SES gene is modulated. One of ordinary skill in the art will appreciate that host cells containing more than one of the described SES gene and protein modifications may be readily produced using the methods of the invention, and are meant to be included in the present invention.

[0123] A host cell of the invention, such as a prokaryotic or eukaryotic host cell in culture, can be used to produce (i.e., express) an SES protein. Accordingly, the invention further provides methods for producing SES proteins using the host cells of the invention. In one embodiment, the method comprises culturing the host cell of invention (into which a recombinant expression vector encoding an SES protein has been introduced, or into which genome has been introduced a gene encoding a wild-type or altered SES protein) in a suitable medium until SES protein is produced. In another embodiment, the method further comprises isolating SES proteins from the medium or the host cell.

C. Isolated SES Proteins

[0124] Another aspect of the invention pertains to isolated SES proteins, and biologically active portions thereof. An “isolated” or “purified” protein or biologically active portion thereof is substantially free of cellular material when produced by recombinant DNA techniques, or chemical precursors or other chemicals when chemically synthesized. The language “substantially free of cellular material” includes preparations of SES protein in which the protein is separated from cellular components of the cells in which it is naturally or recombinantly produced. In one embodiment, the language “substantially free of cellular material” includes preparations of SES protein having less than about 30% (by dry weight) of non-SES protein (also referred to herein as a “contaminating protein”), more preferably less than about 20% of non-SES protein, still more preferably less than about 10% of non-SES protein, and most preferably less than about 5% non-SES protein. When the SES protein or biologically active portion thereof is recombinantly produced, it is also preferably substantially free of culture medium, i.e., culture medium represents less than about 20%, more preferably less than about 10%, and most preferably less than about 5% of the volume of the protein preparation. The language “substantially free of chemical precursors or other chemicals” includes preparations of SES protein in which the protein is separated from chemical precursors or other chemicals which are involved in the synthesis of the protein. In one embodiment, the language “substantially free of chemical precursors or other chemicals” includes preparations of SES protein having less than about 30% (by dry weight) of chemical precursors or non-SES chemicals, more preferably less than about 20% chemical precursors or non-SES chemicals, still more preferably less than about 10% chemical precursors or non-SES chemicals, and most preferably less than about 5% chemical precursors or non-SES chemicals. In preferred embodiments, isolated proteins or biologically active portions thereof lack contaminating proteins from the same organism from which the SES protein is derived. Typically, such proteins are produced by recombinant expression of, for example, a C. glutamicum SES protein in a microorganism such as C. glutamicum.

[0125] An isolated SES protein or a portion thereof of the invention can participate in the repair or recombination of DNA, in the transposition of genetic material, in gene expression (i.e., the processes of transcription or translation), in protein folding, or in protein secretion in Corynebacterium glutamicum, or has one or more of the activities set forth in Table 1. In preferred embodiments, the protein or portion thereof comprises an amino acid sequence which is sufficiently homologous to an amino acid sequence of Appendix B such that the protein or portion thereof maintains the ability to participate in the repair or recombination of DNA, in the transposition of genetic material, in gene expression (i.e., the processes of transcription or translation), in protein folding, or in protein secretion in Corynebacterium glutamicum. The portion of the protein is preferably a biologically active portion as described herein. In another preferred embodiment, an SES protein of the invention has an amino acid sequence shown in Appendix B. In yet another preferred embodiment, the SES protein has an amino acid sequence which is encoded by a nucleotide sequence which hybridizes, e.g., hybridizes under stringent conditions, to a nucleotide sequence of Appendix A. In still another preferred embodiment, the SES protein has an amino acid sequence which is encoded by a nucleotide sequence that is at least about 50%, 51%, 52%, 53%, 54%, 55%, 56%, 57%, 58%, 59%, or 60%, preferably at least about 61%, 62%, 63%, 64%, 65%, 66%, 67%, 68%, 69%, or 70%, more preferably at least about 71%, 72%, 73%, 74%, 75%, 76%, 77%, 78%, 79%, or 80%, 81%, 82%, 83%, 84%, 85%, 86%, 87%, 88%, 89%, or 90%, or 91%, 92%, 93%, 94%, and even more preferably at least about 95%, 96%, 97%, 98%, 99% or more homologous to one of the nucleic acid sequences of Appendix A, or a portion thereof. Ranges and identity values intermediate to the above-recited values, (e.g., 70-90% identical or 80-95% identical) are also intended to be encompassed by the present invention. For example, ranges of identity values using a combination of any of the above values recited as upper and/or lower limits are intended to be included. The preferred SES proteins of the present invention also preferably possess at least one of the SES activities described herein. For example, a preferred SES protein of the present invention includes an amino acid sequence encoded by a nucleotide sequence which hybridizes, e.g., hybridizes under stringent conditions, to a nucleotide sequence of Appendix A, and which can participate in the repair or recombination of DNA, in the transposition of genetic material, in gene expression (i.e., the processes of transcription or translation), in protein folding, or in protein secretion in Corynebacterium glutamicum, or which has one or more of the activities set forth in Table 1.

[0126] In other embodiments, the SES protein is substantially homologous to an amino acid sequence of Appendix B and retains the functional activity of the protein of one of the sequences of Appendix B yet differs in amino acid sequence due to natural variation or mutagenesis, as described in detail in subsection I above. Accordingly, in another embodiment, the SES protein is a protein which comprises an amino acid sequence which is at least about 50%, 51%, 52%, 53%, 54%, 55%, 56%, 57%, 58%, 59%, or 60%, preferably at least about 61%, 62%, 63%, 64%, 65%, 66%, 67%, 68%, 69%, or 70%, more preferably at least about 71%, 72%, 73%, 74%, 75%, 76%, 77%, 78%, 79%, or 80%, 81%, 82%, 83%, 84%, 85%, 86%, 87%, 88%, 89%, or 90%, or 91%, 92%, 93%, 94%, and even more preferably at least about 95%, 96%, 97%, 98%, 99% or more homologous to an entire amino acid sequence of Appendix B and which has at least one of the SES activities described herein. Ranges and identity values intermediate to the above-recited values, (e.g., 70-90% identical or 80-95% identical) are also intended to be encompassed by the present invention. For example, ranges of identity values using a combination of any of the above values recited as upper and/or lower limits are intended to be included. In another embodiment, the invention pertains to a full length C. glufamicuin protein which is substantially homologous to an entire amino acid sequence of Appendix B.

[0127] Biologically active portions of an SES protein include peptides comprising amino acid sequences derived from the amino acid sequence of an SES protein, e.g., the an amino acid sequence shown in Appendix B or the amino acid sequence of a protein homologous to an SES protein, which include fewer amino acids than a full length SES protein or the full length protein which is homologous to an SES protein, and exhibit at least one activity of an SES protein. Typically, biologically active portions (peptides, e.g., peptides which are, for example, 5, 10, 15, 20, 30, 35, 36, 37, 38, 39, 40, 50, 100 or more amino acids in length) comprise a domain or motif with at least one activity of an SES protein. Moreover, other biologically active portions, in which other regions of the protein are deleted, can be prepared by recombinant techniques and evaluated for one or more of the activities described herein. Preferably, the biologically active portions of an SES protein include one or more selected domains/motifs or portions thereof having biological activity.

[0128] SES proteins are preferably produced by recombinant DNA techniques. For example, a nucleic acid molecule encoding the protein is cloned into an expression vector (as described above), the expression vector is introduced into a host cell (as described above) and the SES protein is expressed in the host cell. The SES protein can then be isolated from the cells by an appropriate purification scheme using standard protein purification techniques. Alternative to recombinant expression, an SES protein, polypeptide, or peptide can be synthesized chemically using standard peptide synthesis techniques. Moreover, native SES protein can be isolated from cells (e.g., endothelial cells), for example using an anti-SES antibody, which can be produced by standard techniques utilizing an SES protein or fragment thereof of this invention.

[0129] The invention also provides SES chimeric or fusion proteins. As used herein, an SES “chimeric protein” or “fusion protein” comprises an SES polypeptide operatively linked to a non-SES polypeptide. An “SES polypeptide” refers to a polypeptide having an amino acid sequence corresponding to an SES protein, whereas a “non-SES polypeptide” refers to a polypeptide having an amino acid sequence corresponding to a protein which is not substantially homologous to the SES protein, e.g., a protein which is different from the SES protein and which is derived from the same or a different organism. Within the fusion protein, the term “operatively linked” is intended to indicate that the SES polypeptide and the non-SES polypeptide are fused in-frame to each other. The non-SES polypeptide can be fused to the N-terminus or C-terminus of the SES polypeptide. For example, in one embodiment the fusion protein is a GST-SES fusion protein in which the SES sequences are fused to the C-terminus of the GST sequences. Such fusion proteins can facilitate the purification of recombinant SES proteins. In another embodiment, the fusion protein is an SES protein containing a heterologous signal sequence at its N-terminus. In certain host cells (e.g., mammalian host cells), expression and/or secretion of an SES protein can be increased through use of a heterologous signal sequence.

[0130] Preferably, an SES chimeric or fusion protein of the invention is produced by standard recombinant DNA techniques. For example, DNA fragments coding for the different polypeptide sequences are ligated together in-frame in accordance with conventional techniques, for example by employing blunt-ended or stagger-ended termini for ligation, restriction enzyme digestion to provide for appropriate termini, filling-in of cohesive ends as appropriate, alkaline phosphatase treatment to avoid undesirable joining, and enzymatic ligation. In another embodiment, the fusion gene can be synthesized by conventional techniques including automated DNA synthesizers. Alternatively, PCR amplification of gene fragments can be carried out using anchor primers which give rise to complementary overhangs between two consecutive gene fragments which can subsequently be annealed and reamplified to generate a chimeric gene sequence (see, for example, Current Protocols in Molecular Biology, eds. Ausubel et al. John Wiley & Sons: 1992). Moreover, many expression vectors are commercially available that already encode a fusion moiety (e.g., a GST polypeptide). An SES-encoding nucleic acid can be cloned into such an expression vector such that the fusion moiety is linked in-frame to the SES protein.

[0131] Homologues of the SES protein can be generated by mutagenesis, e.g., discrete point mutation or truncation of the SES protein. As used herein, the term “homologue” refers to a variant form of the SES protein which acts as an agonist or antagonist of the activity of the SES protein. An agonist of the SES protein can retain substantially the same, or a subset, of the biological activities of the SES protein. An antagonist of the SES protein can inhibit one or more of the activities of the naturally occurring form of the SES protein, by, for example, competitively binding to a downstream or upstream member of a biochemical cascade which includes the SES protein, by binding to a target molecule with which the SES protein interacts, such that no function interaction is possible, or by binding directly to the SES protein and inhibiting its normal activity.

[0132] In an alternative embodiment, homologues of the SES protein can be identified by screening combinatorial libraries of mutants, e.g., truncation mutants, of the SES protein for SES protein agonist or antagonist activity. In one embodiment, a variegated library of SES variants is generated by combinatorial mutagenesis at the nucleic acid level and is encoded by a variegated gene library. A variegated library of SES variants can be produced by, for example, enzymatically ligating a mixture of synthetic oligonucleotides into gene sequences such that a degenerate set of potential SES sequences is expressible as individual polypeptides, or alternatively, as a set of larger fusion proteins (e.g., for phage display) containing the set of SES sequences therein. There are a variety of methods which can be used to produce libraries of potential SES homologues from a degenerate oligonucleotide sequence. Chemical synthesis of a degenerate gene sequence can be performed in an automatic DNA synthesizer, and the synthetic gene then ligated into an appropriate expression vector. Use of a degenerate set of genes allows for the provision, in one mixture, of all of the sequences encoding the desired set of potential SES sequences. Methods for synthesizing degenerate oligonucleotides are known in the art (see, e.g., Narang, S. A. (1983) Tetrahedron 39:3; Itakura et al.(1984) Annu. Rev. Biochem. 53:323; Itakura et al.(1984) Science 198:1056; Ike et al.(1983) Nucleic Acid Res. 11:477.

[0133] In addition, libraries of fragments of the SES protein coding can be used to generate a variegated population of SES fragments for screening and subsequent selection of homologues of an SES protein. In one embodiment, a library of coding sequence fragments can be generated by treating a double stranded PCR fragment of an SES coding sequence with a nuclease under conditions wherein nicking occurs only about once per molecule, denaturing the double stranded DNA, renaturing the DNA to form double stranded DNA which can include sense/antisense pairs from different nicked products, removing single stranded portions from reformed duplexes by treatment with SI nuclease, and ligating the resulting fragment library into an expression vector. By this method, an expression library can be derived which encodes N-terminal, C-terminal and internal fragments of various sizes of the SES protein.

[0134] Several techniques are known in the art for screening gene products of combinatorial libraries made by point mutations or truncation, and for screening cDNA libraries for gene products having a selected property. Such techniques are adaptable for rapid screening of the gene libraries generated by the combinatorial mutagenesis of SES homologues. The most widely used techniques, which are amenable to high through-put analysis, for screening large gene libraries typically include cloning the gene library into replicable expression vectors, transforming appropriate cells with the resulting library of vectors, and expressing the combinatorial genes under conditions in which detection of a desired activity facilitates isolation of the vector encoding the gene whose product was detected. Recursive ensemble mutagenesis (REM), a new technique which enhances the frequency of functional mutants in the libraries, can be used in combination with the screening assays to identify SES homologues (Arkin and Yourvan (1992) PNAS 89:7811-7815; Delgrave et al.(1993) Protein Engineering 6(3):327-331).

[0135] In another embodiment, cell based assays can be exploited to analyze a variegated SES library, using methods well known in the ant.

D. Uses and Methods of the Invention

[0136] The nucleic acid molecules, proteins, protein homologues, fusion proteins, primers, vectors, and host cells described herein can be used in one or more of the following methods: identification of C. glutamicum and related organisms; mapping of genomes of organisms related to C. glutamicum; identification and localization of C. glutamicum sequences of interest; evolutionary studies; determination of SES protein regions required for function; modulation of an SES protein activity; and modulation of cellular production of a desired compound, such as a fine chemical.

[0137] The SES nucleic acid molecules of the invention have a variety of uses. First, they may be used to identify an organism as being Corynebacterium glutamicum or a close relative thereof. Also, they may be used to identify the presence of C. glutamicum or a relative thereof in a mixed population of microorganisms. The invention provides the nucleic acid sequences of a number of C. glutamicum genes; by probing the extracted genomic DNA of a culture of a unique or mixed population of microorganisms under stringent conditions with a probe spanning a region of a C. glutamicum gene which is unique to this organism, one can ascertain whether this organism is present.

[0138] Although Corynebacterium glutamicum itself is nonpathogenic, it is related to pathogenic species, such as Corynebacterium diphtheriae. Corynebacterium diphtheriae is the causative agent of diphtheria, a rapidly developing, acute, febrile infection which involves both local and systemic pathology. In this disease, a local lesion develops in the upper respiratory tract and involves necrotic injury to epithelial cells; the bacilli secrete toxin which is disseminated through this lesion to distal susceptible tissues of the body. Degenerative changes brought about by the inhibition of protein synthesis in these tissues, which include heart, muscle, peripheral nerves, adrenals, kidneys, liver and spleen, result in the systemic pathology of the disease. Diphtheria continues to have high incidence in many parts of the world, including Africa, Asia, Eastern Europe and the independent states of the former Soviet Union. An ongoing epidemic of diphtheria in the latter two regions has resulted in at least 5,000 deaths since 1990.

[0139] In one embodiment, the invention provides a method of identifying the presence or activity of Cornyebacterium diphtheriae in a subject. This method includes detection of one or more of the nucleic acid or amino acid sequences of the invention (e.g., the sequences set forth in Appendix A or Appendix B) in a subject, thereby detecting the presence or activity of Corynebacterium diphtheriae in the subject. C. glutamicum and C. diphtheriae are related bacteria, and many of the nucleic acid and protein molecules in C. glutamicum are homologous to C. diphtheriae nucleic acid and protein molecules, and can therefore be used to detect C. diphtheriae in a subject.

[0140] The nucleic acid and protein molecules of the invention may also serve as markers for specific regions of the genome. This has utility not only in the mapping of the genome, but also for functional studies of C. glutamicum proteins. For example, to identify the region of the genome to which a particular C. glutamicum DNA-binding protein binds, the C. glutamicum genome could be digested, and the fragments incubated with the DNA-binding protein. Those which bind the protein may be additionally probed with the nucleic acid molecules of the invention, preferably with readily detectable labels; binding of such a nucleic acid molecule to the genome fragment enables the localization of the fragment to the genome map of C. glutamicum, and, when performed multiple times with different enzymes, facilitates a rapid determination of the nucleic acid sequence to which the protein binds. Further, the nucleic acid molecules of the invention may be sufficiently homologous to the sequences of related species such that these nucleic acid molecules may serve as markers for the construction of a genomic map in related bacteria, such as Brevibacterium lactofermentum.

[0141] The SES nucleic acid molecules of the invention are also useful for evolutionary and protein structural studies. The metabolic and transport processes in which the molecules of the invention participate are utilized by a wide variety of prokaryotic and eukaryotic cells; by comparing the sequences of the nucleic acid molecules of the present invention to those encoding similar enzymes from other organisms, the evolutionary relatedness of the organisms can be assessed. Similarly, such a comparison permits an assessment of which regions of the sequence are conserved and which are not, which may aid in determining those regions of the protein which are essential for the functioning of the enzyme. This type of determination is of value for protein engineering studies and may give an indication of what the protein can tolerate in terms of mutagenesis without losing function.

[0142] Manipulation of the SES nucleic acid molecules of the invention may result in the production of SES proteins having functional differences from the wild-type SES proteins. These proteins may be improved in efficiency or activity, may be present in greater numbers in the cell than is usual, or may be decreased in efficiency or activity.

[0143] The invention provides methods for screening molecules which modulate the activity of an SES protein, either by interacting with the protein itself or a substrate or binding partner of the SES protein, or by modulating the transcription or translation of an SES nucleic acid molecule of the invention. In such methods, a microorganism expressing one or more SES proteins of the invention is contacted with one or more test compounds, and the effect of each test compound on the activity or level of expression of the SES protein is assessed.

[0144] The modulation of activity of proteins involved in C. glutamicum DNA repair, recombination, or transposition should impact the genetic stability of the cell. For example, by decreasing the number or activity of proteins involved in DNA repair mechanisms, one may decrease the ability of the cell to correct genetic errors, which should permit the simplified introduction of desired mutations into the genome (such as those encoding proteins involved in fine chemical production). Increasing the activity or number of transposons should result in a similarly increased mutation rate in the genome, and can permit facile duplication of desired genes (e.g., those encoding fine chemical biosynthetic proteins) or disruption of undesired genes (e.g., those encoding fine chemical degradation proteins). Conversely, by decreasing the number or activity of transposons or by increasing the number or activity of DNA repair proteins, it may be possible to increase the genetic stability of C. glutamicum, which in turn should result in better retention of introduced mutations in this microorganism through multiple generations in culture. Ideally, during mutagenesis and strain construction, one or more DNA repair systems would be decreased in activity and one or more transposons may be increased in activity, but once the desired mutation had been achieved in a strain, these the reverse would occur. Such manipulation is possible by placement of one or more DNA repair genes or transposons under control of an inducible repressor.

[0145] Modulation of proteins involved in transcription and translation in C. glutamicum can have both direct and indirect effects on the production of a fine chemical from these microorganisms. For example, by manipulating a protein which directly translates a gene (e.g., a polymerase) or which directly regulates transcription (e.g., a repressor or activator protein), it is possible to directly affect the expression of the target gene. In the case of genes encoding a protein involved in the biosynthesis or degradation of a fine chemical, this type of genetic manipulation should have a direct effect on the production of this fine chemical. Mutagenesis of a repressor protein such that it can no longer repress its target gene, or mutagenesis of an activator protein such that it is optimized in activity should lead to an increase in transcription of the target gene. If the target gene is, for example, a fine chemical biosynthetic gene, then an increase in production of that chemical may result, due to the overall greater number of transcripts present for the gene, which should result in greater numbers of the protein as well. Increasing the number or activity of a repressor protein for a target sequence or decreasing the number or activity of an activator protein for a target sequence when this sequence is, for example, a fine chemical degradative protein, then a similar increase in production of the fine chemical should result.

[0146] Indirect effects on fine chemical production may also arise due to manipulation of proteins involved in transcription and translation. For example, by modulating the activity or number of transcription factors (e.g., the sigma factors) or translational repressors/activators which globally regulate transcription in C. glutamicum in response to environmental or metabolic factors, it should be possible to uncouple cellular transcription from environmental or metabolic regulation. In turn, this may permit continued transcription under conditions which would normally slow or altogether stop gene expression, such as those unfavorable conditions (e.g., high temperature, low oxygen, high waste product levels) which exist in large-scale fermentor cultures. By increasing the rate of-gene (e.g., fine chemical biosynthetic gene) expression in such situations, the overall rate of fine product production may also be increased, at least due to the relatively greater number of fine chemical biosynthetic proteins in the cell. Principles and examples for modification of transcription and transcriptional regulation are described in, e.g., Lewin, B. (1990) Genes IV, Part 3: “Controlling procaryotic genes by transcription” Oxford Univ. Press: Oxford, p. 213-301.

[0147] Modulation of the activity or number of proteins involved in polypeptide folding (e.g., chaperones) may permit an increase in the overall production of correctly folded molecules in the cell. This has two effects: first, an overall increase in the number of proteins in the cell, due to the fact that fewer proteins are misfolded and degraded, and second, an increase in the number of any given protein that is correctly folded and thus active (see, e.g., Thomas, J. G., Baneyx, F. (1997) Protein Expression and Purification 11(3): 289-296; Luo, Z. H., and Hua, Z. C. (1998) Biochemistry and Molecular Biology International 46(3): 471-477; Dale, G. E., et al.(1994) Protein Engineering 7(7): 925-931; Amrein, K. E. et al.(1995) Proc. Natl. Acad: Sci. U.S.A. 92(4): 1048-1052; and Caspers, P. et al.(1994) Cell. Mol. Biol. 40(5): 635-644). While such mutations result in an increase in the number of active proteins of all kinds, when coupled with additional mutations increasing the activity or number of, e.g., a fine chemical biosynthetic protein, an additive effect in the amount of correctly folded, active desired protein may be obtained.

[0148] Manipulation of proteins involved in secretion of polypeptides from C. glutamicum such that they are improved in activity or number may directly improve the secretion of a proteinaceous fine chemical (e.g., an enzyme) from this microorganism. It is significantly easier to harvest and purify fine chemicals when they are secreted into the medium of large-scale cultures than when they are retained in the cell, so the yield and production of a fine chemical should be increased through such secretion system engineering. Genetic manipulation of these secretion proteins may also result in indirect improvements in the production of one or more fine chemicals. First, increased or decreased activity of one or more C. glutamicum secretion systems (as brought about by mutagenesis of one or more SES proteins involved in such pathways) may result in increased or decreased global secretion rates from the cell. Many such secreted proteins have functions critical for cell viability (e.g., cell surface proteases or receptors). An alteration of a secretory pathway such that these proteins are more readily transported to their extracellular location may improve the overall viability of the cell, and thus result in greater numbers of C. glutamicum cells capable of producing fine chemicals during large-scale culture. Second, certain bacterial secretion systems, (e.g., the sec system) are known to play a significant role in the process by which integral membrane proteins (e.g. channels, pores, or transporters) insert into cellular membranes. If the activity of one or more secretory pathway proteins is increased, then the ability of the cell to produce fine chemicals may be similarly increased, due to the presence of increased intracellular nutrient levels or decreased intracellular waste levels. If the activity of one or more such secretory pathway protein is decreased, then there may be insufficient nutrients available to support overproduction of desired compounds, or waste products may interfere with the biosynthesis of desired fine chemicals.

[0149] The aforementioned mutagenesis strategies for SES proteins to result in increased yields of a fine chemical from C. glutamicum are not meant to be limiting; variations on these strategies will be readily apparent to one of ordinary skill in the art. Using such strategies, and incorporating the mechanisms disclosed herein, the nucleic acid and protein molecules of the invention may be utilized to generate C. glutamicum or related strains of bacteria expressing mutated SES nucleic acid and protein molecules such that the yield, production, and/or efficiency of production of a desired compound is improved. This desired compound may be any product produced by C. glutamicum, which includes the final products of biosynthesis pathways and intermediates of naturally-occurring metabolic pathways, as well as molecules which do not naturally occur in the metabolism of C. glutamicum, but.which are produced by a C. glutamicum strain of the invention.

[0150] This invention is further illustrated by the following examples which should not be construed as limiting. The contents of all references, patent applications, patents, published patent applications, Tables, Appendices, and the sequence listing cited throughout this application are hereby incorporated by reference.

### EXEMPLIFICATION

### Example 1

### Preparation of Total Genomic DNA of Corynebacterium Glutamicum ATCC 13032

[0151] A culture of Corynebacterium glutamicum (ATCC 13032) was grown overnight at 30° C. with vigorous shaking in BHI medium (Difco). The cells were harvested by centrifugation, the supernatant was discarded and the cells were resuspended in 5 ml buffer-I (5% of the original volume of the culture—all indicated volumes have been calculated for 100 ml of culture volume). Composition of buffer-I: 140.34 g/l sucrose, 2.46 g/l MgSO₄×7H₂O, 10 ml/l KH₂PO₄ solution (100 g/l, adjusted to pH 6.7 with KOH), 50 ml/l M12 concentrate (10 g/l (NH₄)₂SO₄, 1 g/l NaCl, 2 g/l MgSO₄×7H_{2O,} 0.2 g/l CaCl₂, 0.5 g/l yeast extract (Difco), 10 mi/l trace-elements-mix (200 mg/l FeSO₄×H₂O, 10 mg/l ZnSO₄×7 H₂O, 3 mg/l MnCl₂×4 H₂O, 30 mg/l H₃BO₃20 mg/l CoCl₂×6 H₂O, 1 mg/l NiCl₂×6 H₂O, 3 mg/l Na₂MoO₄×2 H₂O, 500 mg/l complexing agent (EDTA or critic acid), 100 ml/l vitamins-mix (0.2 mg/l biotin, 0.2 mg/l folic acid, 20 mg/l p-amino benzoic acid, 20 mg/l riboflavin, 40 mg/l ca-panthothenate, 140 mg/l nicotinic acid, 40 mg/l pyridoxole hydrochloride, 200 mg/l myo-inositol). Lysozyme was added to the suspension to a final concentration of 2.5 mg/ml. After an approximately 4 h incubation at 37° C., the cell wall was degraded and the resulting protoplasts are harvested by centrifugation. The pellet was washed once with 5 ml buffer-I and once with 5 ml TE-buffer (10 mM Tris-HCl, 1 mM EDTA, pH 8). The pellet was resuspended in 4 ml TE-buffer and 0.5 ml SDS solution (10%) and 0.5 ml NaCl solution (5 M) are added. After adding of proteinase K to a final concentration of 200 μg/ml, the suspension is incubated for ca.18 h at 37° C. The DNA was purified by extraction with phenol, phenol-chloroform-isoamylalcohol and chloroform-isoamylalcohol using standard procedures. Then, the DNA was precipitated by adding 1/50 volume of 3 M sodium acetate and 2 volumes of ethanol, followed by a 30 min incubation at −20° C. and a 30 min centrifugation at 12,000 rpm in a high speed centrifuge using a SS34 rotor (Sorvall). The DNA was dissolved in 1 ml TE-buffer containing 20 gg/ml RNaseA and dialysed at 4° C against 1000 ml TE-buffer for at least 3 hours. During this time, the buffer was exchanged 3 times. To aliquots of 0.4 ml of the dialysed DNA solution, 0.4 ml of 2 M LiCl and 0.8 ml of ethanol are added. After a 30 min incubation at −20° C., the DNA was collected by centrifugation (13,000 rpm, Biofuge Fresco, Heraeus, Hanau, Germany). The DNA pellet was dissolved in TE-buffer. DNA prepared by this procedure could be used for all purposes, including southern blotting or construction of genomic libraries.

### Example 2

### Construction of Genomic Libraries in Escherichia Coli of Corynebacterium Glutamicum ATCC13032.

[0152] Using DNA prepared as described in Example 1, cosmid and plasmid libraries were constructed according to known and well established methods (see e.g., Sambrook, J. et al.(1989) “Molecular Cloning: A Laboratory Manual”, Cold Spring Harbor Laboratory Press, or Ausubel, F. M. et al.(1994) “Current Protocols in Molecular Biology”, John Wiley & Sons.)

[0153] Any plasmid or cosmid could be used. Of particular use were the plasmids pBR322 (Sutcliffe, J. G. (1979) Proc. Natl. Acad. Sci. USA, 75:3737-3741); pACYC177 (Change & Cohen (1978) J. Bacteriol 134:1141-1156), plasmids of the pBS series (pBSSK+, pBSSK− and others; Stratagene, Lalolla, USA), or cosmids as SuperCosl (Stratagene, LaJolla, USA) or Lorist6 (Gibson, T. J., Rosenthal A. and Waterson, R. H. (1987) Gene 53:283-286. Gene libraries specifically for use in C. glutamicum may be constructed using plasmid pSL109 (Lee, H.-S. and A. J. Sinskey (1994) J. Microbiol. Biotechnol. 4: 256-263).

### Example 3

### DNA Sequencing and Computational Functional Analysis

[0154] Genomic libraries as described in Example 2 were used for DNA sequencing according to standard methods, in particular by the chain termination method using ABI377 sequencing machines (see e.g., Fleischman, R. D. et al.(1995) “Whole-genome Random Sequencing and Assembly of Haemophilus Influenzae Rd., Science, 269:496-512). Sequencing primers with the following nucleotide sequences were used: 5′-GGAAACAGTATGACCATG-3′ or 5′-GTAAAACGACGGCCAGT-3′.

### Example 4

### In Vivo Mutagenesis

[0155] In vivo mutagenesis of Corynebacterium glutamicum can be performed by passage of plasmid (or other vector) DNA through E. coli or other microorganisms (e.g. Bacillus spp. or yeasts such as Saccharomyces cerevisiae) which are impaired in their capabilities to maintain the integrity of their genetic information. Typical mutator strains have mutations in the genes for the DNA repair system (e.g., mutHLS, mutD, mutT, etc.; for reference, see Rupp, W. D. (1996) DNA repair mechanisms, in: Escherichia coli and Salmonella, p. 2277-2294, ASM: Washington.) Such strains are well known to one of ordinary skill in the art. The use of such strains is illustrated, for example, in Greener, A. and Callahan, M. (1994) Strategies 7: 32-34.

### Example 5

### DNA Transfer Between Escherichia Coli and Corynebacterium Glutamicum

[0156] Several Corynebacterium and Brevibacterium species contain endogenous plasmids (as e.g., pHM1519 or pBL1) which replicate autonomously (for review see, e.g., Martin, J. F. et al.(1987) Biotechnology, 5:137-146). Shuttle vectors for Escherichia coli and Corynebacterium glutamicum can be readily constructed by using standard vectors for E. coli (Sambrook, J. et al.(1989), “Molecular Cloning: A Laboratory Manual”, Cold Spring Harbor Laboratory Press or Ausubel, F. M. et al.(1994) “Current Protocols in Molecular Biology”, John Wiley & Sons) to which a origin or replication for and a suitable marker from Corynebacterium glutamicum is added. Such origins of replication are preferably taken from endogenous plasmids isolated from Corynebacterium and Brevibacterium species. Of particular use as transformation markers for these species are genes for kanamycin resistance (such as those derived from the Tn5 or Tn903 transposons) or chloramphenicol (Winnacker, E. L. (1987) “From Genes to Clones—Introduction to Gene Technology, VCH, Weinheim). There are numerous examples in the literature of the construction of a wide variety of shuttle vectors which replicate in both E. coli and C. glutamicum, and which can be used for several purposes, including gene over-expression (for reference, see e.g., Yoshihama, M. et al. (1985) J. Bacteriol. 162:591-597, Martin J. F. et al. (1987) Biotechnology, 5:137-146 and Eikmanns, B. J. et al.(1991) Gene, 102:93-98).

[0157] Using standard methods, it is possible to clone a gene of interest into one of the shuttle vectors described above and to introduce such a hybrid vectors into strains of Corynebacterium glutamicum. Transformation of C. glutamicum can be achieved by protoplast transformation (Kastsumata, R. et al.(1984) J. Bacteriol. 159306-311), electroporation (Liebl, E. et al.(1989) FEMS Microbiol. Letters, 53:399-303) and in cases where special vectors.are used, also by conjugation (as described e.g. in Schäfer, A et al.(1990) J. Bacteriol. 172:1663-1666). It is also possible to transfer the shuttle vectors for C. glutamicum to E. coli by preparing plasmid DNA from C. glutamicum (using standard methods well-known in the art) and transforming it into E. coli. This transformation step can be performed using standard methods, but it is advantageous to use an Mcr-deficient E. coli strain, such as NM522 (Gough & Murray (1983) J. Mol. Biol. 166:1-19).

[0158] Genes may be overexpressed in C. glutamicum strains using plasmids which comprise pCG1 (U.S. Pat. No. 4,617,267) or fragments thereof, and optionally the gene for kanamycin resistance from TN903 (Grindley, N. D. and Joyce, C. M. (1980) Proc. Natl. Acad. Sci. USA 77(12): 7176-7180). In addition, genes may be overexpressed in C. glutamicum strains using plasmid pSL 109 (Lee, H.-S. and A. J. Sinskey (1994) J. Microbiol. Biotechnol. 4: 256-263).

[0159] Aside from the use of replicative plasmids, gene overexpression can also be achieved by integration into the genome. Genomic integration in C. glutamicum or other Corynebacterium or Brevibacterium species may be accomplished by well-known methods, such as homologous recombination with genomic region(s), restriction endonuclease mediated integration (REMI) (see, e.g., DE Patent 19823834), or through the use of transposons. It is also possible to modulate the activity of a gene of interest by modifying the regulatory regions (e.g., a promoter, a repressor, and/or an enhancer) by sequence modification, insertion, or deletion using site-directed methods (such as homologous recombination) or methods based on random events (such as transposon mutagenesis or REMI). Nucleic acid sequences which function as transcriptional terminators may also be inserted 3′ to the coding region of one or more genes of the invention; such terminators are well-known in the art and are described, for example, in Winnacker, E. L. (1987) From Genes to Clones—Introduction to Gene Technology. VCH: Weinheim.

### Example 6

### Assessment of the Expression of the Mutant Protein

[0160] Observations of the activity of a mutated protein in a transformed host cell rely on the fact that the mutant protein is expressed in a similar fashion and in a similar quantity to that of the wild-type protein. A useful method to ascertain the level of transcription of the mutant gene (an indicator of the amount of mRNA available for translation to the gene product) is to perform a Northern blot (for reference see, for example, Ausubel et al.(1988) Current Protocols in Molecular Biology, Wiley: N.Y.), in which a primer designed to bind to the gene of interest is labeled with a detectable tag (usually radioactive or chemiluminescent), such that when the total RNA of a culture of the organism is extracted, run on gel, transferred to a stable matrix and incubated with this probe, the binding and quantity of binding of the probe indicates the presence and also the quantity of mRNA for this gene. This information is evidence of the degree of transcription of the mutant gene. Total cellular RNA can be prepared from Corynebacterium glutamicum by several methods, all well-known in the art, such as that described in Bormann, E. R. et al.(1992) Mol. Microbiol. 6: 317-326.

[0161] To assess the presence or relative quantity of protein translated from this mRNA, standard techniques, such as a Western blot, may be employed (see, for exarnple, Ausubel et al.(1988) Current Protocols in Molecular Biology, Wiley: N.Y.). In this process, total cellular proteins are extracted, separated by gel electrophoresis, transferred to a matrix such as nitrocellulose, and incubated with a probe, such as an antibody, which specifically binds to the desired protein. This probe is generally tagged with a chemiluminescent or colorimetric label which may be readily detected. The presence and quantity of label observed indicates the presence and quantity of the desired mutant protein present in the cell.

### Example 7

### Growth of Genetically Modified Corynebacterium glutamicum—Media and Culture Conditions

[0162] Genetically modified Corynebacteria are cultured in synthetic or natural growth media. A number of different growth media for Corynebacteria are both well-known and readily available (Lieb et al.(1989) Appl. Microbiol. Biotechnol., 32:205-210; von der Osten et al.(1998) Biotechnology Letters, 11:11-16; Patent DE 4,120,867; Liebl (1992) “The Genus Corynebacterium, in: The Procaryotes, Volume II, Balows, A. et al., eds. Springer-Verlag). These media consist of one or more carbon sources, nitrogen sources, inorganic salts, vitamins and trace elements. Preferred carbon sources are sugars, such as mono-, di-, or polysaccharides. For example, glucose, fructose, mannose, galactose, ribose, sorbose, ribulose, lactose, maltose, sucrose, raffinose, starch or cellulose serve as very good carbon sources. It is also possible to supply sugar to the media via complex compounds such as molasses or other by-products from sugar refinement. It can also be advantageous to supply mixtures of different carbon sources. Other possible carbon sources are alcohols and organic acids, such as methanol, ethanol, acetic acid or lactic acid. Nitrogen sources are usually organic or inorganic nitrogen compounds, or materials which contain these compounds. Exemplary nitrogen sources include ammonia gas or ammonia salts, such as NR₄Cl or (NH₄)₂SO₄, NH₄OH, nitrates, urea, amino acids or complex nitrogen sources like corn steep liquor, soy bean flour, soy bean protein, yeast extract, meat extract and others.

[0163] Inorganic salt compounds which may be included in the media include the chloride-, phosphorous- or sulfate- salts of calcium, magnesium, sodium, cobalt, molybdenum, potassium, manganese, zinc, copper and iron. Chelating compounds can be added to the medium to keep the metal ions in solution. Particularly usefuil chelating compounds include dihydroxyphenols, like catechol or protocatechuate, or organic acids, such as citric acid. It is typical for the media to also contain other growth factors, such as vitamins or growth promoters, examples of which include biotin, riboflavin, thiamin, folic acid, nicotinic acid, pantothenate and pyridoxin. Growth factors and salts frequently originate from complex media components such as yeast extract, molasses, corn steep liquor and others. The exact composition of the media compounds depends strongly on the immediate experiment and is individually decided for each specific case. Information about media optimization is available in the textbook “Applied Microbiol. Physiology, A Practical Approach (eds. P. M. Rhodes, P. F. Stanbury, IRL Press (1997) pp. 53-73, ISBN 0 19 963577 3). It is also possible to select growth media from commercial suppliers, like standard 1 (Merck) or BHI (grain heart infusion, DIFCO) or others.

[0164] All medium components are sterilized, either by heat (20 minutes at 1.5 bar and 121° C.) or by sterile filtration. The components can either be sterilized together or, if necessary, separately. All media components can be present at the beginning of growth, or they can optionally be added continuously or batchwise.

[0165] Culture conditions are defined separately for each experiment. The temperature should be in a range between 15° C. and 45° C. The temperature can be kept constant or can be altered during the experiment. The pH of the medium should be in the range of 5 to 8.5, preferably around 7.0, and can be maintained by the addition of buffers to the media. An exemplary buffer for this purpose is a potassium phosphate buffer. Synthetic buffers such as MOPS, HEPES, ACES and others can alternatively or simultaneously be used. It is also possible to maintain a constant culture pH through the addition of NaOH or NH₄OH during growth. If complex medium components such as yeast extract are utilized, the necessity for additional buffers may be reduced, due to the fact that many complex compounds have high buffer capacities. If a fermentor is utilized for culturing the micro-organisms, the pH can also be controlled using gaseous ammonia.

[0166] The incubation time is usually in a range from several hours to several days. This time is selected in order to permit the maximal amount of product to accumulate in the broth. The disclosed growth experiments can be carried out in a variety of vessels, such as microtiter plates, glass tubes, glass flasks or glass or metal fermentors of different sizes. For screening a large number of clones, the microorganisms should be cultured in microtiter plates, glass tubes or shake flasks, either with or without baffles. Preferably 100 ml shake flasks are used, filled with 10% (by volume) of the required growth medium. The flasks should be shaken on a rotary shaker (amplitude 25 mm) using a speed-range of 100-300 rpm. Evaporation losses can be diminished by the maintenance of a humid atmosphere; alternatively, a mathematical correction for evaporation losses should be performed.

[0167] If genetically modified clones are tested, an unmodified control clone or a control clone containing the basic plasmid without any insert should also be tested. The medium is inoculated to an OD₆₀₀ of 0.5-1.5 using cells grown on agar plates, such as CM plates (10 g/l glucose, 2,5 g/l NaCl, 2 g/l urea, 10 g/l polypeptone, 5 g/l yeast extract, 5 g/l meat extract, 22 g/l NaCl, 2 g/l urea, 10 g/l polypeptone, 5 g/l yeast extract, 5 g/l meat extract, 22 g/l agar, pH 6.8 with 2M NaOH) that had been incubated at 30° C. Inoculation of the media is accomplished by either introduction of a saline suspension of C. glutamicum cells from CM plates or addition of a liquid preculture of this bacterium.

### Example 8

### In Vitro Analysis of the Function of Mutant Proteins

[0168] The determination of activities and kinetic parameters of enzymes is well established in the art. Experiments to determine the activity of any given altered enzyme must be tailored to the specific activity of the wild-type enzyme, which is well within the ability of one of ordinary skill in the art. Overviews about enzymes in general, as well as specific details concerning structure, kinetics, principles, methods, applications and examples for the determination of many enzyme activities may be found, for example, in the following references: Dixon, M., and Webb, E. C., (1979) Enzymes. Longmans: London; Fersht, (1985) Enzyme Structure and Mechanism. Freeman: New York; Walsh, (1979) Enzymatic Reaction Mechanisms. Freeman: San Francisco; Price, N. C., Stevens, L. (1982) Fundamentals of Enzymology. Oxford Univ. Press: Oxford; Boyer, P. D., ed. (1983) The Enzymes, 3^{rd} ed. Academic Press: New York; Bisswanger, H., (1994) Enzymkinetik, 2^{nd} ed. VCH: Weinheim (ISBN 3527300325); Bergmeyer, H. U., Bergmeyer, J., Graβ1, M., eds. (1983-1986) Methods of Enzymatic Analysis, 3^{rd} ed., vol. I-XII, Verlag Chemie: Weinheim; and Ullmann's Encyclopedia of Industrial Chemistry (1987) vol. A9, “Enzymes”. VCH: Weinheim, p. 352-363.

[0169] The activity of proteins which bind to DNA can be measured by several well-established methods, such as DNA band-shift assays (also called gel retardation assays). The effect of such proteins on the expression of other molecules can be measured using reporter gene assays (such as that described in Kolmar, H. et al.(1995) EMBO J. 14: 3895-3904 and references cited therein). Reporter gene test systems are well known and established for applications in both pro- and eukaryotic cells, using enzymes such as beta-galactosidase, green fluorescent protein, and several others.

[0170] The determination of activity of membrane-transport proteins can be performed according to techniques such as those described in Gennis, R. B. (1989) “Pores, Channels and Transporters”, in Biomembranes, Molecular Structure and Function, Springer: Heidelberg, p. 85-137; 199-234; and 270-322.

### Example 9

### Analysis of Impact of Mutant Protein on the Production of the Desired Product

[0171] The effect of the genetic modification in C. glutamicum on production of a desired compound (such as an amino acid) can be assessed by growing the modified microorganism under suitable conditions (such as those described above) and analyzing the medium and/or the cellular component for increased production of the desired product (i.e., an amino acid). Such analysis techniques are well known to one of ordinary skill in the art, and include spectroscopy, thin layer chromatography, staining methods of various kinds, enzymatic and microbiological methods, and analytical chromatography such as high performance liquid chromatography (see, for example, Ullman, Encyclopedia of Industrial Chemistry, vol. A2, p. 89-90 and p. 443-613, VCH: Weinheim (1985); Fallon, A. et al., (1987) “Applications of HPLC in Biochemistry” in: Laboratory Techniques in Biochemistry and Molecular Biology, vol. 17; Rehm et al.(1993) Biotechnology, vol. 3, Chapter III: “Product recovery and purification”, page 469-714, VCH: Weinheim; Belter, P. A. et al.(1988) Bioseparations: downstream processing for biotechnology, John Wiley and Sons; Kennedy, J. F. and Cabral, J. M. S. (1992) Recovery processes for biological materials, John Wiley and Sons; Shaeiwitz, J. A. and Henry, J. D. (1988) Biochemical separations, in: Ulmann's Encyclopedia of Industrial Chemistry, vol. B3, Chapter 11, page 1-27, VCH: Weinheim; and Dechow, F. J. (1989) Separation and purification techniques in biotechnology, Noyes Publications.)

[0172] In addition to the measurement of the final product of fermentation, it is also possible to analyze other components of the metabolic pathways utilized for the production of the desired compound, such as intermediates and side-products, to determine the overall efficiency of production of the compound. Analysis methods include measurements of nutrient levels in the medium (e.g., sugars, hydrocarbons, nitrogen sources, phosphate, and other ions), measurements of biomass composition and growth, analysis of the production of common metabolites of biosynthetic pathways, and measurement of gasses produced during fermnentation. Standard methods for these measurements are outlined in Applied Microbial Physiology, A Practical Approach, P. M. Rhodes and P. F. Stanbury, eds., IRL Press, p. 103-129; 131-163; and 165-192 (ISBN: 0199635773) and references cited therein.

### Example 10

### Purification of the Desired Product from C. Glutamicum Culture

[0173] Recovery of the desired product from the C. glutamicum cells or supernatant of the above-described culture can be performed by various methods well known in the art. If the desired product is not secreted from the cells, the cells can be harvested from the culture by low-speed centrifugation, the cells can be lysed by standard techniques, such as mechanical force or sonication. The cellular debris is removed by centrifugation, and the supernatant fraction containing the soluble proteins is retained for further purification of the desired compound. If the product is secreted from the C. glutamicum cells, then the cells are removed from the culture by low-speed centrifugation, and the supernate fraction is retained for further purification.

[0174] The supernatant fraction from either purification method is subjected to chromatography with a suitable resin, in which the desired molecule is either retained on a chromatography resin while many of the impurities in the sample are not, or where the impurities are retained by the resin while the sample is not. Such chromatography steps may be repeated as necessary, using the same or different chromatography resins. One of ordinary skill in the art would be well-versed in the selection of appropriate chromatography resins and in their most efficacious application for a particular molecule to be purified. The purified product may be concentrated by filtration or ultrafiltration, and stored at a temperature at which the stability of the product is maximized.

[0175] There are a wide array of purification methods known to the art and the preceding method of purification is not meant to be limiting. Such purification techniques are described, for example, in Bailey, J. E. & Ollis, D. F. Biochemical Engineering Fundamentals, McGraw-Hill: N.Y. (1986).

[0176] The identity and purity of the isolated compounds may be assessed by techniques standard in the art. These include high-performance liquid chromatography (HPLC), spectroscopic methods, staining methods, thin layer chromatography, NIRS, enzymatic assay, or microbiologically. Such analysis methods are reviewed in: Patek et al.(1994) Appl. Environ. Microbiol. 60: 133-140; Malakhova et al.(1996) Biotekhnologiya 11: 27-32; and Schmidt et al.(1998) Bioprocess Engineer. 19: 67-70. Ulmann's Encyclopedia of Industrial Chemistry, (1996) vol. A27, VCH: Weinheim, p. 89-90, p. 521-540, p. 540-547, p. 559-566, 575-581 and p. 581-587; Michal, G. (1999) Biochemical Pathways: An Atlas of Biochemistry and Molecular Biology, John Wiley and Sons; Fallon, A. et al.(1987) Applications of HPLC in Biochemistry in: Laboratory Techniques in Biochemistry and Molecular Biology, vol. 17.

### Example 11

### Analysis of the Gene Sequences of the Invention

[0177] The comparison of sequences and determination of percent homology between two sequences are art-known techniques, and can be accomplished using a mathematical algorithm, such as the algorithm of Karlin and Altschul (1990) Proc. Natl. Acad. Sci. USA 87:2264-68, modified as in Karlin and Altschul (1993) Proc. Natl. Acad. Sci. USA 90:5873-77. Such an algorithm is incorporated into the NBLAST and XBLAST programs (version 2.0) of Altschul, et al.(1990) J. Mol. Biol. 215:403-10. BLAST nucleotide searches can be performed with the NBLAST program, score=100, wordlength=12 to obtain nucleotide sequences homologous to SES nucleic acid molecules of the invention. BLAST protein searches can be performed with the XBLAST program, score=50, wordlength=3 to obtain amino acid sequences homologous to SES protein molecules of the invention. To obtain gapped alignments for comparison purposes, Gapped BLAST can be utilized as described in Altschul et al., (1997) Nucleic Acids Res. 25(17):3389-3402. When utilizing BLAST and Gapped BLAST programs, one of ordinary skill in the art will know how to optimize the parameters of the program (e.g., XBLAST and NBLAST) for the specific sequence being analyzed.

[0178] Another example of a mathematical algorithm utilized for the comparison of sequences is the algorithm of Meyers and Miller ((1988) Comput. Appl. Biosci. 4: 11-17). Such an algorithm is incorporated into the ALIGN program (version 2.0) which is part of the GCG sequence alignment software package. When utilizing the ALIGN program for comparing amino acid sequences, a PAM 120 weight residue table, a gap length penalty of 12, and a gap penalty of 4 can be used. Additional algorithms for sequence analysis are known in the art, and include ADVANCE and ADAM. described in Torelli and Robotti (1994) Comput. Appl. Biosci. 10:3-5; and FASTA, described in Pearson and Lipman (1988) P.N.A.S. 85:2444-8.

[0179] The percent homology between two amino acid sequences can also be accomplished using the GAP program in the GCG software package (available at http://www.gcg.com), using either a Blosum 62 matrix or a PAM250 matrix, and a gap weight of 12, 10, 8, 6, or 4 and a length weight of 2, 3, or 4. The percent homology between two nucleic acid sequences can be accomplished using the GAP program in the GCG software package, using standard parameters, such as a gap weight of 50 and a length weight of 3.

[0180] A comparative analysis of the gene sequences of the invention with those present in Genbank has been performed using techniques known in the art (see, e.g., Bexevanis and Ouellette, eds. (1998) Bioinformatics: A Practical Guide to the Analysis of Genes and Proteins. John Wiley and Sons: New York). The gene sequences of the invention were compared to genes present in Genbank in a three-step process. In a first step, a BLASTN analysis (e.g., a local alignment analysis) was performed for each of the sequences of the invention against the nucleotide sequences present in Genbank, and the top 500 hits were retained for further analysis. A subsequent FASTA search (e.g., a combined local and global alignment analysis, in which limited regions of the sequences are aligned) was performed on these 500 hits. Each gene sequence of the invention was subsequently globally aligned to each of the top three FASTA hits, using the GAP program in the GCG software package (using standard parameters). In order to obtain correct results, the length of the sequences extracted from Genbank were adjusted to the length of the query sequences by methods well-known in the art. The results of this analysis are set forth in Table 4. The resulting data is identical to that which would have been obtained had a GAP (global) analysis alone been performed on each of the genes of the invention in comparison with each of the references in Genbank, but required significantly reduced computational time as compared to such a database-wide GAP (global) analysis. Sequences of the invention for which no alignments above the cutoff values were obtained are indicated on Table 4 by the absence of alignment information. It will further be understood by one of ordinary skill in the art that the GAP alignment homology percentages set forth in Table 4 under the heading “% homology (GAP)” are listed in the European numerical format, wherein a ‘,’ represents a decimal point. For example, a value of “40,345” in this column represents “40.345%”.

### Example 12

### Construction and Operation of DNA Microarrays

[0181] The sequences of the invention may additionally be used in the construction and application of DNA microarrays (the design, methodology, and uses of DNA arrays are well known in the art, and are described, for example, in Schena, M. et al.(1995) Science 270: 467-470; Wodicka, L. et al.(1997) Nature Biotechnology 15: 1359-1367; DeSaizieu, A. et al.(1998) Nature Biotechnology 16: 45-48; and DeRisi, J. L. et al.(1997) Science 278: 680-686).

[0182] DNA microarrays are solid or flexible supports consisting of nitrocellulose, nylon, glass, silicone, or other materials. Nucleic acid molecules may be attached to the surface in an ordered manner. After appropriate labeling, other nucleic acids or nucleic acid mixtures can be hybridized to the immobilized nucleic acid molecules, and the label may be used to monitor and measure the individual signal intensities of the hybridized molecules at defined regions. This methodology allows the simultaneous quantification of the relative or absolute amount of all or selected nucleic acids in the applied nucleic acid sample or mixture. DNA microarrays, therefore, permit an analysis of the expression of multiple (as many as 6800 or more) nucleic acids in parallel (see, e.g., Schena, M. (1996) BioEssays 18(5): 427-431).

[0183] The sequences of the invention may be used to design oligonucleotide primers which are able to amplify defined regions of one or more C. glutamicum genes by a nucleic acid amplification reaction such as the polymerase chain reaction. The choice and design of the 5′ or 3′ oligonucleotide primers or of appropriate linkers allows the covalent attachment of the resulting PCR products to the surface of a support medium described above (and also described, for example, Schena, M. et al.(1995) Science 270: 467-470).

[0184] Nucleic acid microarrays may also be constructed by in situ oligonucleotide synthesis as described by Wodicka, L. et al.(1997) Nature Biotechnology 15: 1359-1367. By photolithographic methods, precisely defined regions of the matrix are exposed to light. Protective groups which are photolabile are thereby activated and undergo nucleotide addition, whereas regions that are masked from light do not undergo any modification. Subsequent cycles of protection and light activation permit the synthesis of different oligonucleotides at defined positions. Small, defined regions of the genes of the invention may be synthesized on microarrays by solid phase oligonucleotide synthesis.

[0185] The nucleic acid molecules of the invention present in a sample or mixture of nucleotides may be hybridized to the microarrays. These nucleic acid molecules can be labeled according to standard methods. In brief, nucleic acid molecules (e.g., mRNA molecules or DNA molecules) are labeled by the incorporation of isotopically or fluorescently labeled nucleotides, e.g., during reverse transcription or DNA synthesis. Hybridization of labeled nucleic acids to microarrays is described (e.g., in Schena, M. et al.(1995) supra; Wodicka, L. et al.(1997), supra; and DeSaizieu A. et al.(1998), supra). The detection and quantification of the hybridized molecule are tailored to the specific incorporated label. Radioactive labels can be detected, for example, as described in Schena, M. et al.(1995) supra) and fluorescent labels may be detected, for example, by the method of Shalon et al.(1996) Genome Research 6: 639-645).

[0186] The application of the sequences of the invention to DNA microarray technology, as described above, permits comparative analyses of different strains of C. glutamicum or other Corynebacteria. For example, studies of inter-strain variations based on individual transcript profiles and the identification of genes that are important for specific and/or desired strain properties such as pathogenicity, productivity and stress tolerance are facilitated by nucleic acid array methodologies. Also, comparisons of the profile of expression of genes of the invention during the course of a fermentation reaction are possible using nucleic acid array technology.

### Example 13

### Analysis of the Dynamics of Cellular Protein Populations (Proteomics)

[0187] The genes, compositions, and methods of the invention may be applied to study the interactions and dynamics of populations of proteins, termed ‘proteomics’. Protein populations of interest include, but are not limited to, the total protein population of C. glutamicum (e.g., in comparison with the protein populations of other organisms), those proteins which are active under specific environmental or metabolic conditions (e.g., during fermentation, at high or low temperature, or at high or low pH), or those proteins which are active during specific phases of growth and development.

[0188] Protein populations can be analyzed by various well-known techniques, such as gel electrophoresis. Cellular proteins may be obtained, for example, by lysis or extraction, and may be separated from one another using a variety of electrophoretic techniques. Sodium dodecyl sulfate polyacrylamide gel electrophoresis (SDS-PAGE) separates proteins largely on the basis of their molecular weight. Isoelectric focusing polyacrylamide gel electrophoresis (IEF-PAGE) separates proteins by their isoelectric point (which reflects not only the amino acid sequence but also posttranslational modifications of the protein). Another, more preferred method of protein analysis is the consecutive combination of both IEF-PAGE and SDS-PAGE, known as 2-D-gel electrophoresis (described, for example, in Hermann et al.(1998) Electrophoresis 19: 3217-3221; Fountoulakis et al.(1998) Electrophoresis 19: 1193-1202; Langen et al.(1997) Electrophoresis 18: 1184-1192; Antelmann et al.(1997) Electrophoresis 18: 1451-1463). Other separation techniques may also be utilized for protein separation, such as capillary gel electrophoresis; such techniques are well known in the art.

[0189] Proteins separated by these methodologies can be visualized by standard techniques, such as by staining or labeling. Suitable stains are known in the art, and include Coomassie Brilliant Blue, silver stain, or fluorescent dyes such as Sypro Ruby (Molecular Probes). The inclusion of radioactively labeled amino acids or other protein precursors (e.g., ³⁵S-methionine, ³⁵S-cysteine, ¹⁴C-labelled amino acids, ¹⁵N-amino acids, ¹⁵NO₃ or ¹⁵NH₄^{+ or} ¹³C-labelled amino acids) in the medium of C. glutamicum permits the labeling of proteins from these cells prior to their separation. Similarly, fluorescent labels may be employed. These labeled proteins can be extracted, isolated and separated according to the previously described techniques.

[0190] Proteins visualized by these techniques can be further analyzed by measuring the amount of dye or label used. The amount of a given protein can be determined quantitatively using, for example, optical methods and can be compared to the amount of other proteins in the same gel or in other gels. Comparisons of proteins on gels can be made, for example, by optical comparison, by spectroscopy, by image scanning and analysis of gels, or through the use of photographic films and screens. Such techniques are well-known in the art.

[0191] To determine the identity of any given protein, direct sequencing or other standard techniques may be employed. For example, N- and/or C-terminal amino acid sequencing (such as Edman degradation) may be used, as may mass spectrometry (in particular MALDI or ESI techniques (see, e.g., Langen et al.(1997) Electrophoresis 18: 1184-1192)). The protein sequences provided herein can be used for the identification of C. glutamicum proteins by these techniques.

[0192] The information obtained by these methods can be used to compare patterns of protein presence, activity, or modification between different samples from various biological conditions (e.g., different organisms, time points of fermentation, media conditions, or different biotopes, among others). Data obtained from such experiments alone, or in combination with other techniques, can be used for various applications, such as to compare the behavior of various organisms in a given (e.g., metabolic) situation, to increase the productivity of strains which produce fine chemicals or to increase the efficiency of the production of fine chemicals.

Equivalents

[0193] Those of ordinary skill in the art will recognize, or will be able to ascertain using no more than routine experimentation, many equivalents to the specific embodiments of the invention described herein. Such equivalents are intended to be encompassed by the following claims.

TABLE 1
GENES IN THE APPLICATION

| Nucleic | Amino | | | | | |
|---|---|---|---|---|---|---|
| Acid | Acid | | | | | |
| SEQ | SEQ | Identification | | NT | NT | |
| ID NO | ID NO | Code | Contig. | Start | Stop | Function |
| 1 | 2 | RXA01278 | GR00369 | 2425 | 299 | Protein Translation Elongation Factor G (EF-G) |
| 3 | 4 | RXA01913 | GR00547 | 1856 | 2680 | Protein translation Elongation Factor Ts (EF-Ts) |
| 5 | 6 | RXN01559 | VV0171 | 7795 | 5954 | PROTEIN-EXPORT MEMBRANE PROTEIN SECD |
| 7 | 8 | F RXA00935 | GR00254 | 654 | 4 | PROTEIN-EXPORT MEMBRANE PROTEIN SECD |
| 9 | 10 | F RXA01559 | GR00434 | 1983 | 1741 | PROTEIN-EXPORT MEMBRANE PROTEIN SECD |
| 11 | 12 | RXA01558 | GR00434 | 1735 | 527 | PROTEIN-EXPORT MEMBRANE PROTEIN SECF |
| 13 | 14 | RXA02429 | GR00707 | 4823 | 7111 | PREPROTEIN TRANSLOCASE SECA SUBUNIT |
| 15 | 16 | RXA02748 | GR00764 | 2434 | 4074 | SIGNAL RECOGNITION PARTICLE PROTEIN |
| 17 | 18 | RXA01355 | GR00393 | 2877 | 3662 | SIGNAL PEPTIDASE I (EC 3.4.21.89) |
| 19 | 20 | RXA00107 | GR00014 | 17940 | 18176 | GLUTAREDOXIN-LIKE PROTEIN NRDH |
| 21 | 22 | RXA01613 | GR00449 | 7055 | 5841 | GLUTATHIONE REDUCTASE (EC 1.6.4.2) |
| 23 | 24 | RXA00539 | GR00139 | 1460 | 1936 | GLUTATHIONE PEROXIDASE (EC 1.11.1.9) |

Genes and enzymes involved in DNA uptake, repair and recombination

| | | | | | | |
|---|---|---|---|---|---|---|
| 25 | 26 | RXA01020 | GR00291 | 998 | 1744 | URACIL-DNA GLYCOSYLASE (EC 3.2.2.—) |
| 27 | 28 | RXN00484 | VV0086 | 47365 | 46286 | DEOXYRIBODIPYRIMIDINE PHOTOLYASE (EC 4.1.99.3) |
| 29 | 30 | F RXA00484 | GR00119 | 21602 | 20568 | DEOXYRIBODIPYRIMIDINE PHOTOLYASE (EC 4.1.99.3) |
| 31 | 32 | RXA02476 | GR00715 | 10514 | 9636 | A/G-SPECIFIC ADENINE GLYCOSYLASE (EC 3.2.2.—) |
| 33 | 34 | RXA00102 | GR00014 | 11288 | 10521 | FORMAMIDOPYRIMIDINE-DNA GLYCOSYLASE (EC 3.2.2.23) |
| 35 | 36 | RXN01670 | VV0079 | 18911 | 18105 | FORMAMIDOPYRIMIDINE-DNA GLYCOSYLASE (EC 3.2.2.23) |
| 37 | 38 | F RXA01670 | GR00466 | 3 | 614 | FORMAMIDOPYRIMIDINE-DNA GLYCOSYLASE (EC 3.2.2.23) |
| 39 | 40 | RXA02078 | GR00628 | 8170 | 9027 | FORMAMIDOPYRIMIDINE-DNA GLYCOSYLASE (EC 3.2.2.23) |
| 41 | 42 | RXA01596 | GR00447 | 4370 | 6148 | DNA REPAIR PROTEIN RECN |
| 43 | 44 | RXA01493 | GR00423 | 7530 | 6220 | DNA-DAMAGE-INDUCIBLE PROTEIN F |
| 45 | 46 | RXA02671 | GR00753 | 11718 | 12296 | DNA REPAIR PROTEIN RADA HOMOLOG |
| 47 | 48 | RXN02291 | VV0127 | 18678 | 18025 | ALKB PROTEIN (DNA repair - alkylated DNA) |
| 49 | 50 | F RXA02291 | GR00662 | 1518 | 865 | DNA repair gene specific for alkylated DNA |
| 51 | 52 | RXN01733 | VV0221 | 70 | 1251 | RECF PROTEIN |
| 53 | 54 | F RXA01733 | GR00492 | 2 | 544 | RECF PROTEIN |
| 55 | 56 | RXA01252 | GR00365 | 643 | 1296 | RECOMBINATION PROTEIN RECR |
| 57 | 58 | RXA01878 | GR00537 | 1239 | 2117 | DIMETHYLADENOSINE TRANSFERASE (EC 2.1.1.—) |
| 59 | 60 | RXA01556 | GR00433 | 1 | 849 | METHYLPHOSPHOTRIESTER-DNA ALKYLTRANSFERASE |
| 61 | 62 | RXA00053 | GR00008 | 8162 | 8554 | MUTATOR MUTT PROTEIN (7,8-DIHYDRO-8-OXOGUANINE- |
| | | | | | | TRIPHOSPHATASE) (8-OXO-DGTPASE) (EC 3.6.1.—) |
| 63 | 64 | RXA00280 | GR00043 | 4196 | 4696 | MUTATOR MUTT PROTEIN (7,8-DIHYDRO-8-OXOGUANINE- |
| | | | | | | TRIPHOSPHATASE) (8-OXO-DGTPASE) (EC 3.6.1.—) |
| 65 | 66 | RXA00333 | GR00057 | 16166 | 16699 | MUTATOR MUTT PROTEIN (7,8-DIHYDRO-8-OXOGUANINE- |
| | | | | | | TRIPHOSPHATASE) (8-OXO-DGTPASE) (EC 3.6.1.—) |
| 67 | 68 | RXA02110 | GR00632 | 3641 | 4258 | MUTATOR MUTT PROTEIN (7,8-DIHYDRO-8-OXOGUANINE- |
| | | | | | | TRIPHOSPHATASE) (8-OXO-DGTPASE) (EC 3.6.1.—) |
| 69 | 70 | RXA02290 | GR00662 | 693 | 295 | DNA-3-METHYLADENINE GLYCOSIDASE I (EC 3.2.2.20) |
| 71 | 72 | RXA02557 | GR00731 | 3766 | 3179 | DNA-3-METHYLADENINE GLYCOSIDASE I (EC 3.2.2.20) |
| 73 | 74 | RXA02130 | GR00638 | 1 | 87 | DNA REPAIR HELICASE RAD25 |
| 75 | 76 | RXA02742 | GR00763 | 12384 | 10036 | Hypothetical DNA Repair Helicase |
| 77 | 78 | RXA02445 | GR00709 | 9362 | 11050 | ATP-DEPENDENT DNA HELICASE RECG |
| 79 | 80 | RXA00927 | GR00253 | 1606 | 518 | HOLLIDAY JUNCTION DNA HELICASE RUVB |
| 81 | 82 | RXA00928 | GR00253 | 2233 | 1616 | HOLLIDAY JUNCTION DNA HELICASE RUVA |
| 83 | 84 | RXN00172 | VV0187 | 7949 | 8560 | RESOLVASE |
| 85 | 86 | F RXA00172 | GR00027 | 455 | 6 | RESOLVASE |
| 87 | 88 | RXA00184 | GR00028 | 8239 | 9411 | DNA repair exonuclease |
| 89 | 90 | RXA00019 | GR00002 | 14399 | 16258 | SINGLE-STRANDED-DNA-SPECIFIC EXONUCLEASE RECJ (EC 3.1.—.—) |
| 91 | 92 | RXA00929 | GR00253 | 2938 | 2276 | CROSSOVER JUNCTION ENDODEOXYRIBONUCLEASE RUVC (EC 3.1.22.4) |
| 93 | 94 | RXA02251 | GR00654 | 18367 | 18666 | EXCINUCLEASE ABC SUBUNIT C |
| 95 | 96 | RXA02252 | GR00654 | 18632 | 20455 | EXCINUCLEASE ABC SUBUNIT C |
| 97 | 98 | RXN02416 | VV0116 | 10457 | 7629 | EXCINUCLEASE ABC SUBUNIT A |
| 99 | 100 | F RXA02416 | GR00705 | 3 | 2642 | EXCINUCLEASE ABC SUBUNIT A |
| 101 | 102 | RXA02563 | GR00732 | 1515 | 2246 | Excinuclease ATPase subunit |
| 103 | 104 | RXA02731 | GR00762 | 3263 | 5359 | EXCINUCLEASE ABC SUBUNIT B |
| 105 | 106 | RXA00998 | GR00283 | 2871 | 2410 | COMA OPERON PROTEIN 2 |
| 107 | 108 | RXN02386 | VV0176 | 368 | 826 | COME OPERON PROTEIN 1 |
| 109 | 110 | F RXA02386 | GR00693 | 1180 | 776 | COME OPERON PROTEIN 1, DNA binding and uptake (competence) |
| 111 | 112 | RXN02388 | VV0176 | 826 | 2487 | COME OPERON PROTEIN 3 |
| 113 | 114 | F RXA02385 | GR00693 | 776 | 6 | COME OPERON PROTEIN 3, DNA binding and uptake (competence) |
| 115 | 116 | F RXA02388 | GR00694 | 1770 | 925 | COME OPERON PROTEIN 3, DNA binding and uptake (competence) |
| 117 | 118 | RXA01975 | GR00571 | 242 | 2137 | PUTATIVE TYPE II RESTRICTION ENDONUCLEASE AND PUTATIVE |
| | | | | | | TYPE I OR TYPE III RESTRICTION ENDONUCLEASE |
| | | | | | | GENES, COMPLETE CDS |
| 119 | 120 | RXA01954 | GR00562 | 3326 | 4165 | TYPE III RESTRICTION-MODIFICATION SYSTEM |
| | | | | | | ECOP15I ENZYME MOD (EC 2.1.1.72) |
| 121 | 122 | RXA02236 | GR00654 | 4249 | 4566 | integration host factor |
| 123 | 124 | RXN01795 | VV0093 | 722 | 1318 | MODIFICATION METHYLASE (EC 2.1.1.73) |
| 125 | 126 | RXN02267 | VV0020 | 10928 | 10056 | DNA (CYTOSINE-5)-METHYLTRANSFERASE (EC 2.1.1.37) |
| 127 | 128 | RXA02988 | VV0093 | 231 | 836 | MODIFICATION METHYLASE SCRFI-A (EC 2.1.1.73) |
| 129 | 130 | RXN00127 | VV0124 | 9789 | 10253 | COMPETENCE PROTEIN F |
| 131 | 132 | RXN02938 | VV0054 | 23357 | 24097 | MUTATOR MUTT PROTEIN (7,8-DIHYDRO-8-OXOGUANINE- |
| | | | | | | TRIPHOSPHATASE) (8-OXO-DGTPASE) |
| 133 | 134 | RXN03102 | VV0067 | 5253 | 4762 | PUTATIVE COMPETENCE-DAMAGE PROTEIN |
| 135 | 136 | RXN03118 | VV0093 | 1330 | 2139 | PUTATIVE TYPE II RESTRICTION ENDONUCLEASE AND PUTATIVE |
| | | | | | | TYPE I OR TYPE III RESTRICTION ENDONUCLEASE |
| | | | | | | GENES, COMPLETE CDS |
| 137 | 138 | RXN02989 | VV0073 | 118 | 1257 | RECA PROTEIN |
| 139 | 140 | RXN03168 | VV0327 | 1777 | 695 | RIBONUCLEASE BN (EC 3.1.—.—) |
| 141 | 142 | RXN02431 | VV0090 | 1 | 876 | UMUC PROTEIN |
| 143 | 144 | RXN02985 | VV0009 | 1182 | 850 | EBSC PROTEIN |
| 145 | 146 | RXN02986 | VV0009 | 801 | 664 | EBSC PROTEIN |
| 147 | 148 | RXS00061 | VV0044 | 4256 | 1590 | DNA POLYMERASE I (EC 2.7.7.7) |
| 149 | 150 | RXS00212 | VV0096 | 12413 | 10854 | DNA LIGASE (EC 6.5.1.2) |
| 151 | 152 | RXS00213 | VV0096 | 12894 | 12322 | DNA LIGASE (EC 6.5.1.2) |
| 153 | 154 | RXS00724 | VV0052 | 1217 | 3193 | ATP-DEPENDENT DNA HELICASE RECG (EC 3.6.1.—) |
| 155 | 156 | RXS00823 | VV0054 | 22014 | 22793 | ENDONUCLEASE III (EC 4.2.99.18) |
| 157 | 158 | RXS00898 | VV0140 | 4755 | 5543 | EXODEOXYRIBONUCLEASE III (EC 3.1.11.2) |
| 159 | 160 | RXS01066 | VV0099 | 21112 | 21837 | DNA REPAIR PROTEIN RECO |
| 161 | 162 | RXS02145 | VV0300 | 12248 | 13864 | ENDONUCLEASE III (EC 4.2.99.18) |
| 163 | 164 | RXS02476 | VV0008 | 49453 | 48575 | A/G-SPECIFIC ADENINE GLYCOSYLASE (EC 3.2.2.—) |
| 165 | 166 | RXS02990 | VV0073 | 1352 | 1948 | REGULATORY PROTEIN RECX |
| 167 | 168 | RXS03098 | VV0064 | 2100 | 2723 | DNA alkylation repair enzyme |
| 169 | 170 | RXS03175 | VV0331 | 1248 | 466 | EXODEOXYRIBONUCLEASE III (EC 3.1.11.2) |

Transposon, IS elements, Transposase, Integrase

| | | | | | | |
|---|---|---|---|---|---|---|
| 171 | 172 | RXN03069 | VV0039 | 5816 | 4734 | INTEGRASE |
| 173 | 174 | F RXA02890 | GR10027 | 112 | 1194 | INTEGRASE |
| 175 | 176 | RXA01601 | GR00447 | 11128 | 12039 | INTEGRASE/RECOMBINASE XERD |
| 177 | 178 | RXA01228 | GR00355 | 1668 | 1883 | TRANSPOSONS TN1721 AND TN4653 RESOLVASE |
| 179 | 180 | RXN03130 | VV0123 | 14262 | 15569 | DNA, TRANSPOSABLE ELEMENT IS31831 |
| 181 | 182 | RXN01969 | VV0155 | 139 | 504 | DNA, TRANSPOSABLE ELEMENT IS31831 |
| 183 | 184 | F RXA00263 | GR00040 | 2243 | 936 | DNA, TRANSPOSABLE ELEMENT IS31831 |
| 185 | 186 | RXN01541 | VV0015 | 56012 | 56788 | PLASMID PASU1 TRANSPOSASE |
| 187 | 188 | F RXA01541 | GR00428 | 3865 | 3095 | PLASMID PASU1 TRANSPOSASE |
| 189 | 190 | RXA02590 | GR00741 | 14837 | 13902 | INSERTION ELEMENT IS1415 TRANSPOSASE (ISTA) AND |
| | | | | | | HELPER PROTEIN (ISTB) GENES, COMPLETE CDS |
| 191 | 192 | RXA00016 | GR00002 | 8857 | 7964 | IS3 RELATED INSERTION ELEMENT |
| 193 | 194 | RXA00265 | GR00040 | 2840 | 3289 | TRANSPOSASE |
| 195 | 196 | RXA00938 | GR00256 | 670 | 927 | TRANSPOSASE |
| 197 | 198 | RXA01264 | GR00367 | 12003 | 11788 | TRANSPOSASE |
| 199 | 200 | RXA01265 | GR00367 | 12616 | 12467 | TRANSPOSASE |
| 201 | 202 | RXA01327 | GR00386 | 753 | 896 | TRANSPOSASE |
| 203 | 204 | RXA01328 | GR00386 | 991 | 1365 | TRANSPOSASE |
| 205 | 206 | RXA01329 | GR00386 | 1407 | 1697 | TRANSPOSASE |
| 207 | 208 | RXA01443 | GR00418 | 13570 | 12740 | TRANSPOSASE |
| 209 | 210 | RXA01444 | GR00418 | 13928 | 13662 | TRANSPOSASE |
| 211 | 212 | RXA01648 | GR00457 | 829 | 461 | TRANSPOSASE |
| 213 | 214 | RXA01649 | GR00457 | 1260 | 841 | TRANSPOSASE |
| 215 | 216 | RXA01650 | GR00457 | 1437 | 1324 | TRANSPOSASE |
| 217 | 218 | RXA01651 | GR00457 | 1618 | 1484 | TRANSPOSASE |
| 219 | 220 | RXN01680 | VV0179 | 17470 | 17060 | TRANSPOSASE |
| 221 | 222 | F RXA01680 | GR00467 | 9590 | 9180 | TRANSPOSASE |
| 223 | 224 | RXN01784 | VV0084 | 13161 | 12580 | TRANSPOSASE |
| 225 | 226 | F RXA01784 | GR00505 | 3 | 551 | TRANSPOSASE |
| 227 | 228 | RXA01862 | GR00529 | 4961 | 6166 | TRANSPOSASE |
| 229 | 230 | RXA01953 | GR00562 | 928 | 548 | TRANSPOSASE |
| 231 | 232 | RXA01998 | GR00589 | 1345 | 2052 | TRANSPOSASE |
| 233 | 234 | RXA02837 | GR00829 | 179 | 6 | TRANSPOSASE |
| 235 | 236 | RXA00005 | GR00001 | 4724 | 6331 | TRANSPOSASE |
| 237 | 238 | RXA00017 | GR00002 | 9150 | 8857 | TRANSPOSASE |
| 239 | 240 | RXA00057 | GR00009 | 2491 | 2393 | TRANSPOSASE |
| 241 | 242 | RXA00227 | GR00032 | 27991 | 27194 | TRANSPOSASE |
| 243 | 244 | RXA01819 | GR00515 | 8287 | 7841 | transposase |
| 245 | 246 | RXN03052 | VV0024 | 5310 | 4555 | INTEGRASE |
| 247 | 248 | RXN02915 | VV0135 | 43798 | 44175 | TRANSPOSASE |
| 249 | 250 | RXN02919 | VV0084 | 14953 | 15486 | TRANSPOSASE |
| 251 | 252 | RXN03033 | VV0012 | 3942 | 5099 | TRANSPOSASE |
| 253 | 254 | RXN03035 | VV0013 | 667 | 1824 | TRANSPOSASE |
| 255 | 256 | RXN03049 | VV0020 | 29926 | 28985 | TRANSPOSASE |
| 257 | 258 | RXN03070 | VV0039 | 8897 | 8070 | TRANSPOSASE |
| 259 | 260 | RXN03121 | VV0101 | 645 | 4 | TRANSPOSASE |
| 261 | 262 | RXN03161 | VV0193 | 884 | 1267 | TRANSPOSASE |
| 263 | 264 | RXN03165 | VV0312 | 1562 | 1242 | TRANSPOSASE |
| 265 | 266 | RXN00083 | VV0048 | 3416 | 3117 | TRANSPOSASE |
| 267 | 268 | RXN02004 | VV0290 | 588 | 382 | TRANSPOSASE |
| 269 | 270 | RXN02287 | VV0127 | 69201 | 69752 | TRANSPOSON TN2501 RESOLVASE |
| 271 | 272 | RXN02963 | VV0102 | 6547 | 5240 | DNA, TRANSPOSABLE ELEMENT IS31831 |

Aminoacyl-tRNA synthetases/tRNAs and tRNA metabolism

| | | | | | | |
|---|---|---|---|---|---|---|
| 273 | 274 | RXA02788 | GR00777 | 2359 | 5022 | ALANYL-TRNA SYNTHETASE (EC 6.1.1.7) |
| 275 | 276 | RXN00975 | VV0149 | 7820 | 9469 | ARGINYL-TRNA SYNTHETASE (EC 6.1.1.19) |
| 277 | 278 | F RXA00975 | GR00275 | 780 | 4 | POSSIBLE ARGINYL-TRNA SYNTHETASE (EC 6.1.1.19) |
| 279 | 280 | F RXA00976 | GR00275 | 1423 | 824 | POSSIBLE ARGINYL-TRNA SYNTHETASE (EC 6.1.1.19) |
| 281 | 282 | RXN01730 | VV0137 | 1709 | 6 | ASPARTYL-TRNA SYNTHETASE (EC 6.1.1.12) |
| 283 | 284 | F RXA01730 | GR00490 | 298 | 1974 | ASPARTYL-TRNA SYNTHETASE (EC 6.1.1.12) |
| 285 | 286 | RXA00314 | GR00053 | 5406 | 4027 | CYSTEINYL-TRNA SYNTHETASE (EC 6.1.1.16) |
| 287 | 288 | RXA02204 | GR00646 | 8756 | 7497 | CYSTEINYL-TRNA SYNTHETASE (EC 6.1.1.16) |
| 289 | 290 | RXA01124 | GR00312 | 2 | 1510 | GLUTAMYL-TRNA SYNTHETASE (EC 6.1.1.17) |
| 291 | 292 | RXN00458 | VV0076 | 8169 | 8804 | GLUTAMYL-TRNA SYNTHETASE (EC 6.1.1.17) |
| 293 | 294 | F RXA00458 | GR00115 | 232 | 5 | GLUTAMYL-TRNA SYNTHETASE (EC 6.1.1.17) |
| 295 | 296 | RXA00069 | GR00011 | 2782 | 1400 | GLYCYL-TRNA SYNTHETASE (EC 6.1.1.14) |
| 297 | 298 | RXA01852 | GR00525 | 4873 | 3587 | HISTIDYL-TRNA SYNTHETASE (EC 6.1.1.21) |
| 299 | 300 | RXA02726 | GR00760 | 4530 | 1597 | ISOLEUCYL-TRNA SYNTHETASE (EC 6.1.1.5) |
| 301 | 302 | RXN00966 | VV0262 | 543 | 4 | LEUCYL-TRNA SYNTHETASE (EC 6.1.1.4) |
| 303 | 304 | F RXA00966 | GR00271 | 533 | 6 | LEUCYL-TRNA SYNTHETASE (EC 6.1.1.4) |
| 305 | 306 | RXN01061 | VV0079 | 1 | 1038 | LEUCYL-TRNA SYNTHETASE (EC 6.1.1.4) |
| 307 | 308 | F RXA01864 | GR00531 | 474 | 4 | LEUCYL-TRNA SYNTHETASE (EC 6.1.1.4) |
| 309 | 310 | F RXA01061 | GR00296 | 10974 | 10567 | LEUCYL-TRNA SYNTHETASE (EC 6.1.1.4) |
| 311 | 312 | RXA00968 | GR00272 | 1007 | 6 | LEUCYL-TRNA SYNTHETASE (EC 6.1.1.4) |
| 313 | 314 | RXA01522 | GR00424 | 26014 | 27591 | LYSYL-TRNA SYNTHETASE (EC 6.1.1.6) |
| 315 | 316 | RXA02015 | GR00609 | 152 | 670 | METHIONYL-TRNA SYNTHETASE (EC 6.1.1.10) |
| 317 | 318 | RXA01582 | GR00440 | 1619 | 2707 | PHENYLALANYL-TRNA SYNTHETASE ALPHA CHAIN (EC 6.1.1.20) |
| 319 | 320 | RXN01583 | VV0122 | 19884 | 17542 | PHENYLALANYL-TRNA SYNTHETASE BETA CHAIN (EC 6.1.1.20) |
| 321 | 322 | F RXA01583 | GR00440 | 2914 | 4629 | PHENYLALANYL-TRNA SYNTHETASE BETA CHAIN (EC 6.1.1.20) |
| 323 | 324 | F RXA01717 | GR00487 | 1000 | 719 | PHENYLALANYL-TRNA SYNTHETASE BETA CHAIN (EC 6.1.1.20) |
| 325 | 326 | RXN01938 | VV0139 | 19106 | 20533 | PROLYL-TRNA SYNTHETASE (EC 6.1.1.15) |
| 327 | 328 | F RXA01938 | GR00556 | 94 | 1008 | PROLYL-TRNA SYNTHETASE (EC 6.1.1.15) |
| 329 | 330 | RXA02692 | GR00754 | 15485 | 16750 | SERYL-TRNA SYNTHETASE (EC 6.1.1.11) |
| 331 | 332 | RXA02167 | GR00640 | 13255 | 14514 | TYROSYL-TRNA SYNTHETASE 1 (EC 6.1.1.1) |
| 333 | 334 | RXA02509 | GR00721 | 2 | 1972 | THREONYL-TRNA SYNTHETASE (EC 6.1.1.3) |
| 335 | 336 | RXN03169 | VV0327 | 2326 | 1889 | TRYPTOPHANYL-TRNA SYNTHETASE (EC 6.1.1.2) |
| 337 | 338 | F RXA02860 | GR10006 | 2 | 439 | TRYPTOPHANYL-TRNA SYNTHETASE (EC 6.1.1.2) |
| 339 | 340 | RXN03078 | VV0045 | 484 | 5 | TRYPTOPHANYL-TRNA SYNTHETASE (EC 6.1.1.2) |
| 341 | 342 | F RXA02866 | GR10007 | 3992 | 4471 | TRYPTOPHANYL-TRNA SYNTHETASE (EC 6.1.1.2) |
| 343 | 344 | RXN00985 | VV0123 | 6747 | 9455 | VALYL-TRNA SYNTHETASE (EC 6.1.1.9) |
| 345 | 346 | F RXA00985 | GR00279 | 498 | 4 | VALYL-TRNA SYNTHETASE (EC 6.1.1.9) |
| 347 | 348 | F RXA01347 | GR00391 | 3036 | 5084 | VALYL-TRNA SYNTHETASE (EC 6.1.1.9) |
| 349 | 350 | RXN00454 | VV0076 | 3497 | 4789 | QUEUINE TRNA-RIBOSYLTRANSFERASE (EC 2.4.2.29) |
| 351 | 352 | F RXA00454 | GR00112 | 869 | 6 | QUEUINE TRNA-RIBOSYLTRANSFERASE (EC 2.4.2.29) |
| 353 | 354 | RXN01490 | VV0139 | 38695 | 37805 | TRNA PSEUDOURIDINE SYNTHASE B (EC 4.2.1.70) |
| 355 | 356 | F RXA01490 | GR00423 | 3442 | 4332 | TRNA PSEUDOURIDINE 55 SYNTHASE |
| 357 | 358 | RXA01621 | GR00452 | 473 | 1912 | TRNA NUCLEOTIDYLTRANSFERASE (EC 2.7.7.25) |
| 359 | 360 | RXN01704 | VV0191 | 1 | 1077 | TRNA (URACIL-5-)-METHYLTRANSFERASE (EC 2.1.1.35) |
| 361 | 362 | F RXA01704 | GR00480 | 3 | 818 | TRNA (URACIL-5-)-METHYLTRANSFERASE (EC 2.1.1.35) |
| 363 | 364 | RXA02523 | GR00725 | 1587 | 2405 | TRNA (GUANINE-N1)-METHYLTRANSFERASE (EC 2.1.1.31) |
| 365 | 366 | RXA02243 | GR00654 | 11114 | 12058 | METHIONYL-TRNA FORMYLTRANSFERASE (EC 2.1.2.9) |
| 367 | 368 | RXA00217 | GR00032 | 17389 | 16295 | PROBABLE TRNA (5-METHYLAMINOMETHYL-2-THIOURIDYLATE) - |
| | | | | | | METHYLTRANSFERASE (EC 2.1.1.61) |
| 369 | 370 | RXA01223 | GR00354 | 4156 | 3545 | PEPTIDYL-TRNA HYDROLASE (EC 3.1.1.29) |
| 371 | 372 | RXA01226 | GR00354 | 7416 | 6973 | PEPTIDYL-TRNA HYDROLASE (EC 3.1.1.29) |
| 373 | 374 | RXA00209 | GR00032 | 9592 | 8102 | L-glutamyl-tRNA(‘Gln)-dependent amidotransferase subunit A (EC 6.3.5.—) |
| 375 | 376 | RXA00210 | GR00032 | 9897 | 9601 | L-glutamyl-tRNA(‘Gln)-dependent amidotransferase subunit C (EC 6.3.5.—) |
| 377 | 378 | RXA02686 | GR00754 | 11266 | 10130 | L-glutamyl-tRNA(‘Gln)-dependent amidotransferase subunit A (EC 6.3.5.—) |
| 379 | 380 | RXA02625 | GR00747 | 791 | 6 | L-glutamyl-tRNA(‘Gln)-dependent amidotransferase subunit B (EC 6.3.5.—) |
| 381 | 382 | RXA01398 | GR00408 | 7645 | 7010 | L-glutamyl-tRNA(‘Gln)-dependent amidotransferase subunit B (EC 6.3.5.—) |
| 383 | 384 | RXA02228 | GR00653 | 1876 | 2778 | TRNA DELTA(2)-ISOPENTENYLPYROPHOSPHATE |
| | | | | | | TRANSFERASE (EC 2.5.1.8) |
| 385 | 386 | RXA02502 | GR00720 | 15510 | 16901 | GLUTAMYL-TRNA REDUCTASE (EC 1.2.1.—) |
| 387 | 388 | RXA02182 | GR00641 | 17875 | 18648 | GLUTAMINE CYCLOTRANSFERASE PRECURSOR (EC 2.3.2.5), |
| | | | | | | Glutaminyl-tRNA cyclotransferase |
| 389 | 390 | RXN00211 | VV0096 | 10126 | 10788 | L-glutamyl-tRNA(‘Gln)-dependent amidotransferase subunit B (EC 6.3.5.—) |
| 391 | 392 | RXN00669 | VV0005 | 38825 | 39706 | PSEUDOURIDYLATE SYNTHASE I (EC 4.2.1.70) |
| 393 | 394 | RXN02651 | VV0090 | 6842 | 7771 | SFHB PROTEIN |

Transcription

| | | | | | | |
|---|---|---|---|---|---|---|
| 395 | 396 | RXA01344 | GR00390 | 2551 | 5 | DNA-DIRECTED RNA POLYMERASE BETA CHAIN (EC 2.7.7.6) |
| 397 | 398 | RXA01387 | GR00407 | 372 | 4 | DNA-DIRECTED RNA POLYMERASE BETA′ CHAIN (EC 2.7.7.6) |
| 399 | 400 | RXA01388 | GR00407 | 590 | 459 | DNA-DIRECTED RNA POLYMERASE BETA CHAIN (EC 2.7.7.6) |
| 401 | 402 | RXA01283 | GR00369 | 7109 | 5817 | DNA-DIRECTED RNA POLYMERASE BETA′ CHAIN (EC 2.7.7.6) |
| 403 | 404 | RXA01433 | GR00417 | 9606 | 9004 | SIGMA FACTOR |
| 405 | 406 | RXA02456 | GR00712 | 1127 | 510 | RNA POLYMERASE SIGMA-H FACTOR |
| 407 | 408 | RXA00304 | GR00051 | 696 | 4 | RNA POLYMERASE SIGMA FACTOR |
| 409 | 410 | RXA00495 | GR00123 | 1210 | 1773 | PUTATIVE RNA POLYMERASE SIGMA FACTOR CY78.15 |
| 411 | 412 | RXA00532 | GR00137 | 3 | 587 | PROBABLE RNA POLYMERASE SIGMA FACTOR CY49.08 |
| 413 | 414 | RXA01530 | GR00426 | 1724 | 1083 | RNA POLYMERASE SIGMA FACTOR RPOD |
| 415 | 416 | RXA01531 | GR00426 | 2565 | 1549 | RNA POLYMERASE SIGMA FACTOR RPOD |
| 417 | 418 | RXA02065 | GR00626 | 5348 | 5995 | EXTRACYTOPLASMIC FUNCTION ALTERNATIVE SIGMA FACTOR |
| 419 | 420 | RXA00588 | GR00156 | 13672 | 14193 | TRANSCRIPTION ELONGATION FACTOR GREA |
| 421 | 422 | RXN01724 | VV0037 | 2128 | 809 | TRANSCRIPTION TERMINATION FACTOR RHO |
| 423 | 424 | F RXA01723 | GR00488 | 6600 | 7436 | TRANSCRIPTION TERMINATION FACTOR RHO |
| 425 | 426 | F RXA01724 | GR00488 | 7429 | 7812 | TRANSCRIPTION TERMINATION FACTOR RHO |
| 427 | 428 | RXN01725 | VV0037 | 825 | 619 | TRANSCRIPTION TERMINATION FACTOR RHO |
| 429 | 430 | F RXA01725 | GR00488 | 7897 | 8004 | TRANSCRIPTION TERMINATION FACTOR RHO |
| 431 | 432 | RXA01726 | GR00488 | 8000 | 8572 | TRANSCRIPTION TERMINATION FACTOR RHO |
| 433 | 434 | RXA00736 | GR00199 | 1 | 1887 | TRANSCRIPTION-REPAIR COUPLING FACTOR |
| 435 | 436 | RXN00737 | VV0094 | 2673 | 1681 | TRANSCRIPTION-REPAIR COUPLING FACTOR |
| 437 | 438 | F RXA00737 | GR00200 | 1 | 480 | TRANSCRIPTION-REPAIR COUPLING FACTOR |
| 439 | 440 | RXN01872 | VV0248 | 2141 | 2968 | TRANSCRIPTIONAL REGULATORY PROTEIN |
| 441 | 442 | F RXA01872 | GR00535 | 768 | 4 | TRANSCRIPTIONAL REGULATORY PROTEIN |
| 443 | 444 | RXA02413 | GR00703 | 3029 | 2538 | PAPX PROTEIN, transcriptional regulator |
| 445 | 446 | RXN01404 | VV0278 | 3 | 1001 | TRANSCRIPTION REGULATORY PROTEIN PEPR1 |
| 447 | 448 | RXN02827 | VV0350 | 428 | 6 | TRANSCRIPTION-REPAIR COUPLING FACTOR |
| 449 | 450 | RXN02732 | VV0145 | 3915 | 3475 | Putative transcription factors |
| 451 | 452 | RXN01671 | VV0079 | 17865 | 16717 | RTCB PROTEIN |
| 453 | 454 | RXS00671 | VV0005 | 37121 | 38134 | DNA-DIRECTED RNA POLYMERASE ALPHA CHAIN (EC 2.7.7.6) |
| 455 | 456 | RXS02760 | VV0025 | 31807 | 32760 | TRANSCRIPTION ANTITERMINATION PROTEIN NUSG |
| 457 | 458 | RXS02830 | VV0168 | 3 | 650 | Helix-turn-helix domain-containing transcription regulator |
| 459 | 460 | RXS03207 | | | | RNA POLYMERASE SIGMA FACTOR |

Translation

| | | | | | | |
|---|---|---|---|---|---|---|
| 461 | 462 | RXA02418 | GR00705 | 5101 | 5667 | Bacterial Protein Translation Initiation Factor 3 (IF-3) |
| 463 | 464 | RXN01496 | VV0139 | 29945 | 32956 | Protein Translation Initiation Factor 2 (IF-2) |
| 465 | 466 | F RXA00755 | GR00203 | 1280 | 6 | Protein Translation Initiation Factor 2 (IF-2) |
| 467 | 468 | F RXA01496 | GR00423 | 10908 | 9181 | Protein Translation Initiation Factor 2 (IF-2) |
| 469 | 470 | RXA00677 | GR00178 | 1624 | 1839 | Bacterial Protein Translation Initiation Factor 1 (IF-1) |
| 471 | 472 | RXN01284 | VV0212 | 570 | 4 | Bacterial Protein Translation Elongation Factor Tu (EF-TU) |
| 473 | 474 | F RXA01284 | GR00370 | 510 | 4 | Bacterial Protein Translation Elongation Factor Tu (EF-TU) |
| 475 | 476 | RXA00138 | GR00022 | 1914 | 2474 | Protein Translation Elongation Factor P (EF-P) |
| 477 | 478 | RXA00331 | GR00057 | 15141 | 14785 | Hypothetical Translational Inhibitor Protein |
| 479 | 480 | RXA02822 | GR00803 | 1 | 570 | Bacterial Peptide Chain Release Factor 1 (RF-1) |
| 481 | 482 | RXA00011 | GR00002 | 2739 | 2383 | Bacterial Peptide Chain Release Factor 2 (RF-2) |
| 483 | 484 | RXA00012 | GR00002 | 3487 | 2612 | Bacterial Peptide Chain Release Factor 2 (RF-2) |
| 485 | 486 | RXN01926 | VV0284 | 1 | 741 | PEPTIDE CHAIN RELEASE FACTOR 3 |
| 487 | 488 | F RXA01926 | GR00554 | 1 | 672 | PEPTIDE CHAIN RELEASE FACTOR 3 |
| 489 | 490 | RXN02002 | VV0111 | 141 | 518 | PEPTIDE CHAIN RELEASE FACTOR 3 |
| 491 | 492 | F RXA02002 | GR00592 | 383 | 6 | PEPTIDE CHAIN RELEASE FACTOR 3 |
| 493 | 494 | RXA00896 | GR00244 | 2884 | 3522 | POLYPEPTIDE DEFORMYLASE (EC 3.5.1.31) |
| 495 | 496 | RXA02242 | GR00654 | 10585 | 11091 | POLYPEPTIDE DEFORMYLASE (EC 3.5.1.31) |
| 497 | 498 | RXS02308 | VV0127 | 13155 | 12727 | TRANSLATION INITIATION INHIBITOR |

Protein translocation, secretion, and folding

| | | | | | | |
|---|---|---|---|---|---|---|
| 499 | 500 | RXA01710 | GR00484 | 850 | 443 | PEPTIDE METHIONINE SULFOXIDE REDUCTASE |
| 501 | 502 | RXN02462 | VV0124 | 11932 | 13749 | PREPROTEIN TRANSLOCASE SECA SUBUNIT |
| 503 | 504 | F RXA00124 | GR00020 | 737 | 6 | PREPROTEIN TRANSLOCASE SECA SUBUNIT |
| 505 | 506 | F RXA02462 | GR00712 | 7653 | 6739 | PREPROTEIN TRANSLOCASE SECA SUBUNIT |
| 507 | 508 | RXA00125 | GR00020 | 1467 | 703 | PREPROTEIN TRANSLOCASE SECA SUBUNIT |
| 509 | 510 | RXA00687 | GR00179 | 9121 | 10440 | PREPROTEIN TRANSLOCASE SECY SUBUNIT |
| 511 | 512 | RXA02260 | GR00654 | 30280 | 30510 | PROTEIN-EXPORT MEMBRANE PROTEIN SECG HOMOLOG |
| 513 | 514 | RXN00046 | VV0119 | 5363 | 6058 | Signal recognition particle GTPase |
| 515 | 516 | F RXA00046 | GR00007 | 5363 | 6058 | Signal recognition particle GTPase |
| 517 | 518 | RXA00753 | GR00202 | 23301 | 21880 | PS1 PROTEIN PRECURSOR (PS1, one of the two major secreted proteins of |
| | | | | | | Corynebacterium glutamicum) |
| 519 | 520 | RXN03038 | VV0017 | 42941 | 43666 | PS1 PROTEIN PRECURSOR |
| 521 | 522 | F RXA01179 | GR00335 | 4639 | 5151 | PS1 PROTEIN PRECURSOR (PS1, one of the two major secreted proteins of |
| | | | | | | Corynebacterium glutamicum) |
| 523 | 524 | RXA01274 | GR00367 | 27148 | 28242 | PS1 PROTEIN PRECURSOR (PS1, one of the two major secreted proteins of |
| | | | | | | Corynebacterium glutamicum) |
| 525 | 526 | RXA01449 | GR00419 | 1046 | 6 | PS1 PROTEIN PRECURSOR (PS1, one of the two major secreted proteins of |
| | | | | | | Corynebacterium glutamicum) |
| 527 | 528 | RXA01798 | GR00509 | 276 | 4 | PS1 PROTEIN PRECURSOR (PS1, one of the two major secreted proteins of |
| | | | | | | Corynebacterium glutamicum) |
| 529 | 530 | RXA01818 | GR00515 | 6453 | 7439 | PS1 PROTEIN PRECURSOR (PS1, one of the two major secreted proteins of |
| | | | | | | Corynebacterium glutamicum) |
| 531 | 532 | RXA02607 | GR00742 | 13971 | 14189 | PS1 PROTEIN PRECURSOR (PS1, one of the two major secreted proteins of |
| | | | | | | Corynebacterium glutamicum) |
| 533 | 534 | RXA02608 | GR00742 | 14248 | 15942 | PS1 PROTEIN PRECURSOR (PS1, one of the two major secreted proteins of |
| | | | | | | Corynebacterium glutamicum) |
| 535 | 536 | RXN03054 | VV0026 | 1906 | 3486 | PS1 PROTEIN PRECURSOR |
| 537 | 538 | F RXA02886 | GR10021 | 1907 | 2737 | PS1 PROTEIN PRECURSOR (PS1, one of the two major secreted proteins of |
| | | | | | | Corynebacterium glutamicum) |
| 539 | 540 | RXN03039 | VV0018 | 2 | 631 | PS1 PROTEIN PRECURSOR |
| 541 | 542 | F RXA02894 | GR10036 | 1017 | 232 | PS1 PROTEIN PRECURSOR (PS1, one of the two major secreted proteins of |
| | | | | | | Corynebacterium glutamicum) |
| 543 | 544 | F RXA02904 | GR10042 | 686 | 12 | PS1 PROTEIN PRECURSOR (PS1, one of the two major secreted proteins of |
| | | | | | | Corynebacterium glutamicum) |
| 545 | 546 | RXA02025 | GR00614 | 862 | 212 | PEPTIDE METHIONINE SULFOXIDE REDUCTASE |
| 547 | 548 | RXA01431 | GR00417 | 7858 | 7538 | THIOREDOXIN REDUCTASE (EC 1.6.4.5)/THIOREDOXIN |
| 549 | 550 | RXA01432 | GR00417 | 8896 | 7946 | THIOREDOXIN REDUCTASE (EC 1.6.4.5) |
| 551 | 552 | RXN00937 | VV0079 | 42335 | 42706 | THIOREDOXIN |
| 553 | 554 | F RXA00937 | GR00256 | 1 | 123 | THIOREDOXIN |
| 555 | 556 | RXA01199 | GR00343 | 3813 | 4583 | THIOREDOXIN |
| 557 | 558 | RXA00824 | GR00221 | 4356 | 4913 | THIOL: DISULFIDE INTERCHANGE PROTEIN TLPA |
| 559 | 560 | RXA01841 | GR00522 | 115 | 477 | THIOL: DISULFIDE INTERCHANGE PROTEIN TLPA |
| 561 | 562 | RXN01863 | VV0206 | 1172 | 24 | /O/C Thioredoxin-like oxidoreductases |
| 563 | 564 | F RXA01863 | GR00530 | 830 | 24 | /O/C Thioredoxin-like oxidoreductases |
| 565 | 566 | RXA02323 | GR00668 | 1429 | 506 | THIOREDOXIN REDUCTASE (EC 1.6.4.5) |
| 567 | 568 | RXA01072 | GR00300 | 377 | 147 | NRDH-REDOXIN |
| 569 | 570 | RXA02436 | GR00709 | 1596 | 1036 | PEPTIDYL-PROLYL CIS-TRANS ISOMERASE (EC 5.2.1.8) |
| 571 | 572 | RXN01837 | VV0320 | 7103 | 7879 | PEPTIDYL-PROLYL CIS-TRANS ISOMERASE (EC 5.2.1.8) |
| 573 | 574 | F RXA01837 | GR00518 | 858 | 466 | PEPTIDYL-PROLYL CIS-TRANS ISOMERASE (EC 5.2.1.8) |
| 575 | 576 | RXS01277 | VV0009 | 32155 | 34158 | PROLYL ENDOPEPTIDASE (EC 3.4.21.26) |
| 577 | 578 | F RXA02047 | GR00624 | 1 | 192 | PROLYL ENDOPEPTIDASE (EC 3.4.21.26) |
| 579 | 580 | RXA02174 | GR00641 | 9290 | 8937 | PROBABLE FK506-BINDING PROTEIN (PEPTIDYL-PROLYL CIS-TRANS |
| | | | | | | ISOMERASE) (PPIASE) (EC 5.2.1.8) |
| 581 | 582 | RXA00568 | GR00152 | 2928 | 1582 | TRIGGER FACTOR |
| 583 | 584 | RXN03040 | VV0018 | 761 | 1069 | PS1 PROTEIN PRECURSOR |
| 585 | 586 | RXN03051 | VV0022 | 2832 | 3566 | PS1 PROTEIN PRECURSOR |
| 587 | 588 | RXN02949 | VV0025 | 31243 | 31575 | PREPROTEIN TRANSLOCASE SECE SUBUNIT |
| 589 | 590 | RXN00833 | VV0180 | 8039 | 8533 | THIOL PEROXIDASE (EC 1.11.1.—) |
| 591 | 592 | RXN01676 | VV0179 | 12059 | 11304 | THIOL: DISULFIDE INTERCHANGE PROTEIN DSBD |
| 593 | 594 | RXN00380 | VV0223 | 836 | 216 | THIOL: DISULFIDE INTERCHANGE PROTEIN TLPA |
| 595 | 596 | RXN02325 | VV0047 | 5527 | 6393 | THIOREDOXIN |
| 597 | 598 | RXN00493 | VV0086 | 14389 | 16002 | 60 KD CHAPERONIN |
| 599 | 600 | RXN02543 | VV0057 | 22031 | 20178 | DNAK PROTEIN |
| 601 | 602 | RXN01345 | VV0123 | 4883 | 3432 | Molecular chaperones (HSP70/DnaK family) |
| 603 | 604 | RXN02736 | VV0074 | 13600 | 14556 | PUTATIVE OXPPCYCLE PROTEIN OPCA |
| 605 | 606 | RXN02280 | VV0152 | 1849 | 26 | TRAP1 |
| 607 | 608 | RXS00170 | VV0031 | 4882 | 3029 | PS1 PROTEIN PRECURSOR |
| 609 | 610 | RXS02641 | VV0098 | 49070 | 51145 | PS1 PROTEIN PRECURSOR |
| 611 | 612 | RXS02650 | VV0090 | 6261 | 6839 | LIPOPROTEIN SIGNAL PEPTIDASE (EC 3.4.23.36) |
| 613 | 614 | RXS00076 | VV0154 | 2752 | 4122 | NADPH: FERREODOXIN OXIDOREDUCTASE PRECURSOR (EC 1.18.1.2) |
| 615 | 616 | RXS01438 | VV0089 | 25340 | 23976 | NADPH: FERREODOXIN OXIDOREDUCTASE PRECURSOR (EC 1.18.1.2) |

[0194] TABLE 2
GENES IDENTIFIED FROM GENBANK

| GenBank ™ Accession No. | Gene Name | Gene Function | Reference |
|---|---|---|---|
| A09073 | ppg | Phosphoenol pyruvate carboxylase | Bachmann, B. et al. “DNA fragment coding for phosphoenolpyruvat |
| | | | corboxylase, recombinant DNA carrying said fragment, strains carrying the |
| | | | recombinant DNA and method for producing L-aminino acids using said strains,” Patent: |
| | | | EP 0358940-A 3 Mar. 21, 1990 |
| A45579, | | Threonine dehydratase | Moeckel, B. et al. “Production of L-isoleucine by means of recombinant |
| A45581, | | | micro-organisms with deregulated threonine dehydratase,” Patent: WO 9519442-A 5 Jul. 20, 1995 |
| A45583, | | | |
| A45585 | | | |
| A45587 | | | |
| AB003132 | murC; ftsQ; ftsZ | | Kobayashi, M. et al. “Cloning, sequencing, and characterization of the ftsZ |
| | | | gene from coryneform bacteria,” Biochem. Biophys. Res. Commun., 236(2): 383-388 (1997) |
| AB015023 | murC; ftsQ | | Wachi, M. et al. “A murC gene from Coryneform bacteria,” Appl. Microbiol. |
| | | | Biotechnol., 51(2): 223-228 (1999) |
| AB018530 | dtsR | | Kimura, E. et al. “Molecular cloning of a novel gene, dtsR, which rescues the |
| | | | detergent sensitivity of a mutant derived from Brevibacterium |
| | | | lactofermentum,” Biosci. Biotechnol. Biochem., 60(10): 1565-1570 (1996) |
| AB018531 | dtsR1; dtsR2 | | |
| AB020624 | murI | D-glutamate racemase | |
| AB023377 | tkt | transketolase | |
| AB024708 | gltB; gltD | Glutamine 2-oxoglutarate aminotransferase | |
| | | large and small subunits | |
| AB025424 | acn | aconitase | |
| AB027714 | rep | Replication protein | |
| AB027715 | rep; aad | Replication protein; aminoglycoside | |
| | | adenyltransferase | |
| AF005242 | argC | N-acetylglutamate-5-semialdehyde | |
| | | dehydrogenase | |
| AF005635 | glnA | Glutamine synthetase | |
| AF030405 | hisF | cyclase | |
| AF030520 | argG | Argininosuccinate synthetase | |
| AF031518 | argF | Ornithine carbamolytransferase | |
| AF036932 | aroD | 3-dehydroquinate dehydratase | |
| AF038548 | pyc | Pyruvate carboxylase | |
| AF038651 | dciAE; apt; rel | Dipeptide-binding protein; adenine | Wehmeier, L. et al. “The role of the Corynebacterium glutamicum rel gene in |
| | | phosphoribosyltransferase; GTP | (p)ppGpp metabolism,” Microbiology, 144: 1853-1862 (1998) |
| | | pyrophosphokinase | |
| AF041436 | argR | Arginine repressor | |
| AF045998 | impA | Inositol monophosphate phosphatase | |
| AF048764 | argH | Argininosuccinate lyase | |
| AF049897 | argC; argJ; argB; | N-acetylglutamylphosphate reductase; | |
| | argD; argF; argR; | ornithine acetyltransferase; N- | |
| | argG; argH | acetylglutamate kinase; acetylornithine | |
| | | transminase; ornithine | |
| | | carbamoyltransferase; arginine repressor; | |
| | | argininosuccinate synthase; | |
| | | argininosuccinate lyase | |
| AF050109 | inhA | Enoyl-acyl carrier protein reductase | |
| AF050166 | hisG | ATP phosphoribosyltransferase | |
| AF051846 | hisA | Phosphoribosylformimino-5-amino-1- | |
| | | phosphoribosyl-4-imidazolecarboxamide | |
| | | isomerase | |
| AF052652 | metA | Homoserine O-acetyltransferase | Park, S. et al. “Isolation and analysis of metA, a methionine biosynthetic gene |
| | | | encoding homoserine acetyltransferase in Corynebacterium glutamicum,” Mol. Cells., 8(3): 286-294 (1998) |
| AF053071 | aroB | Dehydroquinate synthetase | |
| AF060558 | hisH | Glutamine amidotransferase | |
| AF086704 | hisE | Phosphoribosyl-ATP- | |
| | | pyrophosphohydrolase | |
| AF114233 | aroA | 5-enolpyruvylshikimate 3-phosphate | |
| | | synthase | |
| AF116184 | panD | L-aspartate-alpha-decarboxylase precursor | Dusch, N. et al. “Expression of the Corynebacterium glutamicum panD gene |
| | | | encoding L-aspartate-alpha-decarboxylase leads to pantothenate |
| | | | overproduction in Escherichia coli,” Appl. Environ. Microbiol., 65(4)1530-1539 (1999) |
| AF124518 | aroD; aroE | 3-dehydroquinase; shikimate | |
| | | dehydrogenase | |
| AF124600 | aroC; aroK; aroB; | Chorismate synthase; shikimate kinase; 3- | |
| | pepQ | dehydroquinate synthase; putative | |
| | | cytoplasmic peptidase | |
| AF145897 | inhA | | |
| AF145898 | inhA | | |
| AJ001436 | ectP | Transport of ectoine, glycine betaine, | Peter, H. et al. “Corynebacterium glutamicum is equipped with four secondary |
| | | proline | carriers for compatible solutes: Identification, sequencing, and characterization |
| | | | of the proline/ectoine uptake system, ProP, and the ectoine/proline/glycine |
| | | | betaine carrier, EctP,” J. Bacteriol., 180(22): 6005-6012 (1998) |
| AJ004934 | dapD | Tetrahydrodipicolinate succinylase | Wehrmann, A. et al. “Different modes of diaminopimelate synthesis and their |
| | | (incompleteⁱ) | role in cell wall integrity: A study with Corynebacterium glutamicum,” J. |
| | | | Bacteriol., 180(12): 3159-3165 (1998) |
| AJ007732 | ppc; secG; amt; ocd; | Phosphoenolpyruvate-carboxylase; ?; high | |
| | soxA | affinity ammonium uptake protein; putative | |
| | | ornithine-cyclodecarboxylase; sarcosine | |
| | | oxidase | |
| AJ010319 | ftsY, glnB, glnD; srp; | Involved in cell division; PII protein; | Jakoby, M. et al. “Nitrogen regulation in Corynebacterium glutamicum; |
| | amtP | uridylyltransferase (uridylyl-removing | Isolation of genes involved in biochemical characterization of corresponding |
| | | enzmye); signal recognition particle; low | proteins,” FEMS Microbiol., 173(2): 303-310 (1999) |
| | | affinity ammonium uptake protein | |
| AJ132968 | cat | Chloramphenicol aceteyl transferase | |
| AJ224946 | mqo | L-malate: quinone oxidoreductase | Molenaar, D. et al. “Biochemical and genetic characterization of the |
| | | | membrane-associated malate dehydrogenase (acceptor) from Corynebacterium |
| | | | glutamicum,” Eur. J. Biochem., 254(2): 395-403 (1998) |
| AJ238250 | ndh | NADH dehydrogenase | |
| AJ238703 | porA | Porin | Lichtinger, T. et al. “Biochemical and biophysical characterization of the cell |
| | | | wall porin of Corynebacterium glutamicum: The channel is formed by a low |
| | | | molecular mass polypeptide,” Biochemistry, 37(43): 15024-15032 (1998) |
| D17429 | | Transposable element IS31831 | Vertes, A. A. et al. “Isolation and characterization of IS31831, a transposable |
| | | | element from Corynebacterium glutamicum,” Mol. Microbiol., 11(4): 739-746 |
| | | | (1994) |
| D84102 | odhA | 2-oxoglutarate dehydrogenase | Usuda, Y. et al. “Molecular cloning of the Corynebacterium glutamicum |
| | | | (Brevibacterium lactofermentum AJ12036) odhA gene encoding a novel type |
| | | | of 2-oxoglutarate dehydrogenase,” Microbiology, 142: 3347-3354 (1996) |
| E01358 | hdh; hk | Homoserine dehydrogenase; homoserine | Katsumata, R. et al. “Production of L-thereonine and L-isoleucine,” Patent: JP |
| | | kinase | 1987232392-A 1 Oct. 12, 1987 |
| E01359 | | Upstream of the start codon of homoserine | Katsumata, R. et al. “Production of L-thereonine and L-isoleucine,” Patent: JP |
| | | kinase gene | 1987232392-A 2 Oct. 12, 1987 |
| E01375 | | Tryptophan operon | |
| E01376 | trpL; trpE | Leader peptide; anthranilate synthase | Matsui, K. et al. “Tryptophan operon, peptide and protein coded thereby, |
| | | | utilization of tryptophan operon gene expression and production of |
| | | | tryptophan,” Patent: JP 1987244382-A 1 Oct. 24, 1987 |
| E01377 | | Promoter and operator regions of | Matsui, K. et al. “Tryptophan operon, peptide and protein coded thereby, |
| | | tryptophan operon | utilization of tryptophan operon gene expression and production of |
| | | | tryptophan,” Patent: JP 1987244382-A 1 Oct. 24, 1987 |
| E03937 | | Biotin-synthase | Hatakeyama, K. et al. “DNA fragment containing gene capable of coding |
| | | | biotin synthetase and its utilization,” Patent: JP 1992278088-A 1 Oct. 02, 1992 |
| E04040 | | Diamino pelargonic acid aminotransferase | Kohama, K. et al. “Gene coding diaminopelargonic acid aminotransferase and |
| | | | desthiobiotin synthetase and its utilization,” Patent: JP 1992330284-A 1 |
| | | | Nov. 18, 1992 |
| E04041 | | Desthiobiotinsynthetase | Kohama, K. et al. “Gene coding diaminopelargonic acid aminotransferase and |
| | | | desthiobiotin synthetase and its utilization,” Patent: JP 1992330284-A 1 |
| | | | Nov. 18, 1992 |
| E04307 | | Flavum aspartase | Kurusu, Y. et al. “Gene DNA coding aspartase and utilization thereof,” Patent: |
| | | | JP 1993030977-A 1 Feb. 09, 1993 |
| E04376 | | Isocitric acid lyase | Katsumata, R. et al. “Gene manifestation controlling DNA,” Patent: JP |
| | | | 1993056782-A 3 Mar. 09, 1993 |
| E04377 | | Isocitric acid lyase N-terminal fragment | Katsumata, R. et al. “Gene manifestation controlling DNA,” Patent: JP |
| | | | 1993056782-A 3 Mar. 09, 1993 |
| E04484 | | Prephenate dehydratase | Sotouchi, N. et al. “Production of L-phenylalanine by fermentation,” Patent: JP |
| | | | 1993076352-A 2 Mar. 30, 1993 |
| E05108 | | Aspartokinase | Fugono, N. et al. “Gene DNA coding Aspartokinase and its use,” Patent: JP |
| | | | 1993184366-A 1 Jul. 27, 1993 |
| E05112 | | Dihydro-dipichorinate synthetase | Hatakeyama, K. et al. “Gene DNA coding dihydrodipicolinic acid synthetase |
| | | | and its use,” Patent: JP 1993184371-A 1 Jul. 27, 1993 |
| E05776 | | Diaminopimelic acid dehydrogenase | Kobayashi, M. et al. “Gene DNA coding Diaminopimelic acid dehydrogenase |
| | | | and its use,” Patent: JP 1993284970-A 1 Nov. 02, 1993 |
| E05779 | | Threonine synthase | Kohama, K. et al. “Gene DNA coding threonine synthase and its use,” Patent: |
| | | | JP 1993284972-A 1 Nov. 02, 1993 |
| E06110 | | Prephenate dehydratase | Kikuchi, T. et al. “Production of L-phenylalanine by fermentation method,” |
| | | | Patent: JP 1993344881-A 1 Dec. 27, 1993 |
| E06111 | | Mutated Prephenate dehydratase | Kikuchi, T. et al. “Production of L-phenylalanine by fermentation method,” |
| | | | Patent: JP 1993344881-A 1 Dec. 27, 1993 |
| E06146 | | Acetohydroxy acid synthetase | Inui, M. et al. “Gene capable of coding Acetohydroxy acid synthetase and its |
| | | | use,” Patent: JP 1993344893-A 1 Dec. 27, 1993 |
| E06825 | | Aspartokinase | Sugimoto, M. et al. “Mutant aspartokinase gene,” patent: JP 1994062866-A 1 |
| | | | Mar. 08, 1994 |
| E06826 | | Mutated aspartokinase alpha subunit | Sugimoto, M. et al. “Mutant aspartokinase gene,” patent: JP 1994062866-A 1 |
| | | | Mar. 08, 1994 |
| E06827 | | Mutated aspartokinase alpha subunit | Sugimoto, M. et al. “Mutant aspartokinase gene,” patent: JP 1994062866-A 1 |
| | | | Mar. 08, 1994 |
| E07701 | secY | | Honno, N. et al. “Gene DNA participating in integration of membraneous |
| | | | protein to membrane,” Patent: JP 1994169780-A 1 Jun. 21, 1994 |
| E08177 | | Aspartokinase | Sato, Y. et al. “Genetic DNA capable of coding Aspartokinase released from |
| | | | feedback inhibition and its utilization,” Patent: JP 1994261766-A 1 Sep. 20, 1994 |
| E08178, | | Feedback inhibition-released Aspartokinase | Sato, Y. et al. “Genetic DNA capable of coding Aspartokinase released from |
| E08179, | | | feedback inhibition and its utilization,” Patent: JP 1994261766-A 1 Sep. 20, 1994 |
| E08180, | | | |
| E08181, | | | |
| E08182 | | | |
| E08232 | | Acetohydroxy-acid isomeroreductase | Inui, M. et al. “Gene DNA coding acetohydroxy acid isomeroreductase,” |
| | | | Patent: JP 1994277067-A 1 Oct. 04, 1994 |
| E08234 | secE | | Asai, Y. et al. “Gene DNA coding for translocation machinery of protein,” |
| | | | Patent: JP 1994277073-A 1 Oct. 04, 1994 |
| E08643 | | FT aminotransferase and desthiobiotin | Hatakeyama, K. et al. “DNA fragment having promoter function in |
| | | synthetase promoter region | coryneform bacterium,” Patent: JP 1995031476-A 1 Feb. 03, 1995 |
| E08646 | | Biotin synthetase | Hatakeyama, K. et al; “DNA fragment having promoter function in |
| | | | coryneform bacterium,” Patent: JP 1995031476-A 1 Feb. 03, 1995 |
| E08649 | | Aspartase | Kohama, K. et al “DNA fragment having promoter function in coryneform |
| | | | bacterium,” Patent: JP 1995031478-A 1 Feb. 03, 1995 |
| E08900 | | Dihydrodipicolinate reductase | Madori, M. et al. “DNA fragment containing gene coding Dihydrodipicolinate |
| | | | acid reductase and utilization thereof,” Patent: JP 1995075578-A 1 Mar. 20, 1995 |
| E08901 | | Diaminopimelic acid decarboxylase | Madori, M. et al. “DNA fragment containing gene coding Diaminopimelic acid |
| | | | decarboxylase and utilization thereof,” Patent: JP 1995075579-A 1 Mar. 20, 1995 |
| E12594 | | Serine hydroxymethyltransferase | Hatakeyama, K. et al. “Production of L-trypophan,” Patent: JP 1997028391-A |
| | | | 1 Feb. 4, 1997 |
| E12760, | | transposase | Moriya, M. et al. “Amplification of gene using artificial transposon,” Patent: |
| E12759, | | | JP 1997070291-A Mar. 18, 1997 |
| E12758 | | | |
| E12764 | | Arginyl-tRNA synthetase; diaminopimelic | Moriya, M. et al. “Amplification of gene using artificial transposon,” Patent: |
| | | acid decarboxylase | JP 1997070291-A Mar. 18, 1997 |
| E12767 | | Dihydrodipicolinic acid synthetase | Moriya, M. et al. “Amplification of gene using artificial transposon,” Patent: |
| | | | JP 1997070291-A Mar. 18, 1997 |
| E12770 | | aspartokinase | Moriya, M. et al. “Amplification of gene using artificial transposon,” Patent: |
| | | | JP 1997070291-A Mar. 18, 1997 |
| E12773 | | Dihydrodipicolinic acid reductase | Moriya, M. et al. “Amplification of gene using artificial transposon,” Patent: |
| | | | JP 1997070291-A Mar. 18, 1997 |
| E13655 | | Glucose-6-phosphate dehydrogenase | Hatakeyama, K. et al. “Glucose-6-phosphate dehydrogenase and DNA capable |
| | | | of coding the same,” Patent: JP 1997224661-A 1 Sep. 02, 1997 |
| L01508 | IlvA | Threonine dehydratase | Moeckel, B. et al. “Functional and structural analysis of the threonine |
| | | | dehydratase of Corynebacterium glutamicum,” J. Bacteriol., 174: 8065-8072 |
| | | | (1992) |
| L07603 | EC 4.2.1.15 | 3-deoxy-D-arabinoheptulosonate-7- | Chen, C. et al. “The cloning and nucleotide sequence of Corynebacterium |
| | | phosphate synthase | glutamicum 3-deoxy-D-arabinoheptulosonate-7-phosphate synthase gene,” |
| | | | FEMS Microbiol. Lett., 107: 223-230 (1993) |
| L09232 | IlvB; ilvN; ilvC | Acetohydroxy acid synthase large subunit; | Keilhauer, C. et al. “Isoleucine synthesis in Corynebacterium glutamicum: |
| | | Acetohydroxy acid synthase small subunit; | molecular analysis of the ilvB-ilvN-ilvC operon,” J. Bacteriol., 175(17): 5595-5603 |
| | | Acetohydroxy acid isomeroreductase | (1993) |
| L18874 | PtsM | Phosphoenolpyruvate sugar | Fouet, A et al. “Bacillus subtilis sucrose-specific enzyme II of the |
| | | phosphotransferase | phosphotransferase system: expression in Escherichia coli and homology to |
| | | | enzymes II from enteric bacteria,” PNAS USA, 84(24): 8773-8777 (1987); Lee, J. K. |
| | | | et al. “Nucleotide sequence of the gene encoding the Corynebacterium |
| | | | glutamicum mannose enzyme II and analyses of the deduced protein |
| | | | sequence,” FEMS Microbiol. Lett., 119(1-2): 137-145 (1994) |
| L27123 | aceB | Malate synthase | Lee, H-S. et al. “Molecular characterization of aceB, a gene encoding malate |
| | | | synthase in Corynebacterium glutamicum,” J. Microbiol. Biotechnol., |
| | | | 4(4): 256-263 (1994) |
| L27126 | | Pyruvate kinase | Jetten, M. S. et al. “Structural and functional analysis of pyruvate kinase from |
| | | | Corynebacterium glutamicum,” Appl. Environ. Microbiol., 60(7): 2501-2507 |
| | | | (1994) |
| L28760 | aceA | Isocitrate lyase | |
| L35906 | dtxr | Diphtheria toxin repressor | Oguiza, J. A. et al. “Molecular cloning, DNA sequence analysis, and |
| | | | characterization of the Corynebacterium diphtheriae dtxR from Brevibacterium |
| | | | lactofermentum,” J. Bacteriol., 177(2): 465-467 (1995) |
| M13774 | | Prephenate dehydratase | Follettie, M. T. et al. “Molecular cloning and nucleotide sequence of the |
| | | | Corynebacterium glutamicum pheA gene,” J. Bacteriol., 167: 695-702 (1986) |
| M16175 | 5S rRNA | | Park, Y-H. et al. “Phylogenetic analysis of the coryneform bacteria by 56 |
| | | | rRNA sequences,” J. Bacteriol., 169: 1801-1806 (1987) |
| M16663 | trpE | Anthranilate synthase, 5′ end | Sano, K. et al. “Structure and function of the trp operon control regions of |
| | | | Brevibacterium lactofermentum, a glutamic-acid-producing bacterium,” Gene, |
| | | | 52: 191-200 (1987) |
| M16664 | trpA | Tryptophan synthase, 3′end | Sano, K. et al. “Structure and function of the trp operon control regions of |
| | | | Brevibacterium lactofermentum, a glutamic-acid-producing bacterium,” Gene, |
| | | | 52: 191-200 (1987) |
| M25819 | | Phosphoenolpyruvate carboxylase | O'Regan, M. et al. “Cloning and nucleotide sequence of the |
| | | | Phosphoenolpyruvate carboxylase-coding gene of Corynebacterium |
| | | | glutamicum ATCC13032,” Gene, 77(2): 237-251 (1989) |
| M85106 | | 23S rRNA gene insertion sequence | Roller, C. et al. “Gram-positive bacteria with a high DNA G + C content are |
| | | | characterized by a common insertion within their 23S rRNA genes,” J. Gen. |
| | | | Microbiol., 138: 1167-1175 (1992) |
| M85107, | | 23S rRNA gene insertion sequence | Roller, C. et al. “Gram-positive bacteria with a high DNA G + C content are |
| M85108 | | | characterized by a common insertion within their 23S rRNA genes,” J. Gen. |
| | | | Microbiol., 138: 1167-1175 (1992) |
| M89931 | aecD; brnQ; yhbw | Beta C-S lyase; branched-chain amino acid | Rossol, I. et al. “The Corynebacterium glutamicum aecD gene encodes a C-S |
| | | uptake carrier; hypothetical protein yhbw | lyase with alpha, beta-elimination activity that degrades aminoethylcysteine,” |
| | | | J. Bacteriol., 174(9): 2968-2977 (1992); Tauch, A. et al. “Isoleucine uptake in |
| | | | Corynebacterium glutamicum ATCC 13032 is directed by the brnQ gene |
| | | | product,” Arch. Microbiol., 169(4): 303-312 (1998) |
| S59299 | trp | Leader gene (promoter) | Herry, D. M. et al. “Cloning of the trp gene cluster from a tryptophan- |
| | | | hyperproducing strain of Corynebacterium glutamicum: identification of a |
| | | | mutation in the trp leader sequence,” Appl. Environ. Microbiol., 59(3): 791-799 |
| | | | (1993) |
| U11545 | trpD | Anthranilate phosphoribosyltransferase | O'Gara, J. P. and Dunican, L. K. (1994) Complete nucleotide sequence of the |
| | | | Corynebacterium glutamicum ATCC 21850 tpD gene.” Thesis, Microbiology |
| | | | Department, University College Galway, Ireland. |
| U13922 | cglIM; cglIR; clgIIR | Putative type II 5-cytosoine | Schafer, A. et al. “Cloning and characterization of a DNA region encoding a |
| | | methyltransferase; putative type II | stress-sensitive restriction system from Corynebacterium glutamicum ATCC |
| | | restriction endonuclease; putative type I or | 13032 and analysis of its role in intergeneric conjugation with Escherichia |
| | | type III restriction endonuclease | coli,” J. Bacteriol., 176(23): 7309-7319 (1994); Schafer, A. et al. “The |
| | | | Corynebacterium glutamicum cglIM gene encoding a 5-cytosine in an McrBC- |
| | | | deficient Escherichia coli strain,” Gene, 203(2): 95-101 (1997) |
| U14965 | recA | | |
| U31224 | ppx | | Ankri, S. et al. “Mutations in the Corynebacterium glutamicumproline |
| | | | biosynthetic pathway: A natural bypass of the proA step,” J. Bacteriol., |
| | | | 178(15): 4412-4419 (1996) |
| U31225 | proC | L-proline: NADP+ 5-oxidoreductase | Ankri, S. et al. “Mutations in the Corynebacterium glutamicumproline |
| | | | biosynthetic pathway: A natural bypass of the proA step,” J. Bacteriol., |
| | | | 178(15): 4412-4419 (1996) |
| U31230 | obg; proB; unkdh | ?; gamma glutamyl kinase; similar to D- | Ankri, S. et al. “Mutations in the Corynebacterium glutamicumproline |
| | | isomer specific 2-hydroxyacid | biosynthetic pathway: A natural bypass of the proA step,” J. Bacteriol., |
| | | dehydrogenases | 178(15): 4412-4419 (1996) |
| U31281 | bioB | Biotin synthase | Serebriiskii, I. G., “Two new members of the bio B superfamily: Cloning, |
| | | | sequencing and expression of bio B genes of Methylobacillus flagellatum and |
| | | | Corynebacterium glutamicum,” Gene, 175: 15-22 (1996) |
| U35023 | thtR; accBC | Thiosulfate sulfurtransferase; acyl CoA | Jager, W. et al. “A Corynebacterium glutamicum gene encoding a two-domain |
| | | carboxylase | protein similar to biotin carboxylases and biotin-carboxyl-carrier proteins,” |
| | | | Arch. Microbiol., 166(2); 76-82 (1996) |
| U43535 | cmr | Multidrug resistance protein | Jager, W. et al. “A Corynebacterium glutamicum gene conferring multidrug |
| | | | resistance in the heterologous host Escherichia coli,” J. Bacteriol., |
| | | | 179(7): 2449-2451 (1997) |
| U43536 | clpB | Heat shock ATP-binding protein | |
| U53587 | aphA-3 | 3′5″-aminoglycoside phosphotransferase | |
| U89648 | | Corynebacterium glutamicum unidentified | |
| | | sequence involved in histidine biosynthesis, | |
| | | partial sequence | |
| X04960 | trpA; trpB; trpC; trpD; | Tryptophan operon | Matsui, K. et al. “Complete nucleotide and deduced amino acid sequences of |
| | trpE; trpG; trpL | | the Brevibacterium lactofermentum tryptophan operon,” Nucleic Acids Res., |
| | | | 14(24): 10113-10114 (1986) |
| X07563 | lys A | DAP decarboxylase (meso-diaminopimelate | Yeh, P. et al. “Nucleic sequence of the lysA gene of Corynebacterium |
| | | decarboxylase, EC 4.1.1.20) | glutamicum and possible mechanisms for modulation of its expression,” Mol. |
| | | | Gen. Genet., 212(1): 112-119 (1988) |
| X14234 | EC 4.1.1.31 | Phosphoenolpyruvate carboxylase | Eikmanns, B. J. et al. “The Phosphoenolpyruvate carboxylase gene of |
| | | | Corynebacterium glutamicum: Molecular cloning, nucleotide sequence, and |
| | | | expression,” Mol. Gen. Genet., 218(2): 330-339 (1989); Lepiniec, L. et al. |
| | | | “Sorghum Phosphoenolpyruvate carboxylase gene family: structure, function |
| | | | and molecular evolution,” Plant. Mol. Biol., 21 (3): 487-502 (1993) |
| X17313 | fda | Fructose-bisphosphate aldolase | Von der Osten, C. H. et al. “Molecular cloning, nucleotide sequence and fine- |
| | | | structural analysis of the Corynebacterium glutamicum fda gene: structural |
| | | | comparison of C. glutamicum fructose-1, 6-biphosphate aldolase to class I and |
| | | | class II aldolases,” Mol. Microbiol., |
| X53993 | dapA | L-2, 3-dihydrodipicolinate synthetase (EC | Bonnassie, S. et al. “Nucleic sequence of the dapA gene from |
| | | 4.2.1.52) | Corynebacterium glutamicum,” Nucleic Acids Res., 18(21): 6421 (1990) |
| X54223 | | AttB-related site | Cianciotto, N. et al. “DNA sequence homology between att B-related sites of |
| | | | Corynebacterium diphtheriae, Corynebacterium ulcerans, Corynebacterium |
| | | | glutamicum, and the attP site of lambdacorynephage,” FEMS. Microbiol, |
| | | | Lett., 66: 299-302 (1990) |
| X54740 | argS; lysA | Arginyl-tRNA synthetase; Diaminopimelate | Marcel, T. et al. “Nucleotide sequence and organization of the upstream region |
| | | decarboxylase | of the Corynebacterium glutamicum lysA gene,” Mol. Microbiol., 4(11): 1819-1830 |
| | | | (1990) |
| X55994 | trpL; trpE | Putative leader peptide; anthranilate | Heery, D. M. et al. “Nucleotide sequence of the Corynebacterium glutamicum |
| | | synthase component 1 | trpE gene,” Nucleic Acids Res., 18(23): 7138 (1990) |
| X56037 | thrC | Threonine synthase | Han, K. S. et al. “The molecular structure of the Corynebacterium glutamicum |
| | | | threonine synthase gene,” Mol. Microbiol., 4(10): 1693-1702 (1990) |
| X56075 | attB-related site | Attachment site | Cianciotto, N. et al. “DNA sequence homology between att B-related sites of |
| | | | Corynebacterium diphtheriae, Corynebacterium ulcerans, Corynebacterium |
| | | | glutamicum, and the attP site of lambdacorynephage,” FEMS. Microbiol, |
| | | | Lett., 66: 299-302 (1990) |
| X57226 | lysC-alpha; lysC-beta; | Aspartokinase-alpha subunit; | Kalinowski, J. et al. “Genetic and biochemical analysis of the Aspartokinase |
| | asd | Aspartokinase-beta subunit; aspartate beta | from Corynebacterium glutamicum,” Mol. Microbiol., 5(5): 1197-1204 (1991); |
| | | semialdehyde dehydrogenase | Kalinowski, J. et al. “Aspartokinase genes lysC alpha and lysC beta overlap |
| | | | and are adjacent to the aspertate beta-semialdehyde dehydrogenase gene asd in |
| | | | Corynebacterium glutamicum,” Mol. Gen. Genet., 224(3): 317-324 (1990) |
| X59403 | gap; pgk; tpi | Glyceraldehyde-3-phosphate; | Eikmanns, B. J. “Identification, sequence analysis, and expression of a |
| | | phosphoglycerate kinase; triosephosphate | Corynebacterium glutamicum gene cluster encoding the three glycolytic |
| | | isomerase | enzymes glyceraldehyde-3-phosphate dehydrogenase, 3-phosphoglycerate |
| | | | kinase, and triosephosphate isomeras,” J. Bacteriol., 174(19): 6076-6086 |
| | | | (1992) |
| X59404 | gdh | Glutamate dehydrogenase | Bormann, E. R. et al. “Molecular analysis of the Corynebacterium glutamicum |
| | | | gdh gene encoding glutamate dehydrogenase,” Mol. Microbiol., 6(3): 317-326 |
| | | | (1992) |
| X60312 | lysI | L-lysine permease | Seep-Feldhaus, A. H. et al. “Molecular analysis of the Corynebacterium |
| | | | glutamicum lysI gene involved in lysine uptake,” Mol. Microbiol., 5(12): 2995-3005 |
| | | | (1991) |
| X66078 | cop1 | Ps1 protein | Joliff, G. et al. “Cloning and nucleotide sequence of the csp1 gene encoding |
| | | | PS1, one of the two major secreted proteins of Corynebacterium glutamicum: |
| | | | The deduced N-terminal region of PS1 is similar to the Mycobacterium antigen |
| | | | 85 complex,” Mol. Microbiol., 6(16): 2349-2362 (1992) |
| X66112 | glt | Citrate synthase | Eikmanns, B. J. et al. “Cloning sequence, expression and transcriptional |
| | | | analysis of the Corynebacterium glutamicum gltA gene encoding citrate |
| | | | synthase,” Microbiol., 140: 1817-1828 (1994) |
| X67737 | dapB | Dihydrodipicolinate reductase | |
| X69103 | csp2 | Surface layer protein PS2 | Peyret, J. L. et al. “Characterization of the cspB gene encoding PS2, an ordered |
| | | | surface-layer protein in Corynebacterium glutamicum,” Mol. Microbiol., |
| | | | 9(1): 97-109 (1993) |
| X69104 | | IS3 related insertion element | Bonamy, C. et al. “Identification of IS1206, a Corynebacterium glutamicum |
| | | | IS3-related insertion sequence and phylogenetic analysis,” Mol. Microbiol., |
| | | | 14(3): 571-581 (1994) |
| X70959 | leuA | Isopropylmalate synthase | Patek, M. et al. “Leucine synthesis in Corynebacterium glutamicum: enzyme |
| | | | activities, structure of leuA, and effect of leuA inactivation on lysine |
| | | | synthesis,” Appl. Environ. Microbiol., 60(1): 133-140 (1994) |
| X71489 | icd | Isocitrate dehydrogenase (NADP+) | Eikmanns, B. J. et al. “Cloning sequence analysis, expression, and inactivation |
| | | | of the Corynebacterium glutamicum icd gene encoding isocitrate |
| | | | dehydrogenase and biochemical characterization of the enzyme,” J. Bacteriol., |
| | | | 177(3): 774-782 (1995) |
| X72855 | GDHA | Glutamate dehydrogenase (NADP+) | |
| X75083, | mtrA | 5-methyltryptophan resistance | Heery, D. M. et al. “A sequence from a tryptophan-hyperproducing strain of |
| X70584 | | | Corynebacterium glutamicum encoding resistance to 5-methyltryptophan,” |
| | | | Biochem. Biophys. Res. Commun., 201(3): 1255-1262 (1994) |
| X75085 | recA | | Fitzpatrick, R. et al. “Construction and characterization of recA mutant strains |
| | | | of Corynebacterium glutamicum and Brevibacterium lactofermentum,” Appl. |
| | | | Microbiol. Biotechnol., 42(4): 575-580 (1994) |
| X75504 | aceA; thiX | Partial Isocitrate lyase; ? | Reinscheid, D. J. et al. “Characterization of the isocitrate lyase gene from |
| | | | Corynebacterium glutamicum and biochemical analysis of the enzyme,” J. |
| | | | Bacteriol., 176(12): 3474-3483 (1994) |
| X76875 | | ATPase beta-subunit | Ludwig, W. et al. “Phylogenetic relationships of bacteria based on comparative |
| | | | sequence analysis of elongation factor Tu and ATP-synthase beta-subunit |
| | | | genes,” Antonie Van Leeuwenhoek, 64: 285-305 (1993) |
| X77034 | tuf | Elongation factor Tu | Ludwig, W. et al. “Phylogenetic relationships of bacteria based on comparative |
| | | | sequence analysis of elongation factor Tu and ATP-synthase beta-subunit |
| | | | genes,” Antonie Van Leeuwenhoek, 64: 285-305 (1993) |
| X77384 | recA | | Billman-Jacobe, H. “Nucleotide sequence of a recA gene from |
| | | | Corynebacterium glutamicum,” DNA Seq., 4(6): 403-404 (1994) |
| X78491 | aceB | Malate synthase | Reinscheid, D. J. et al. “Malate synthase from Corynebacterium glutamicum |
| | | | pta-ack operon encoding phosphotransacetylase: sequence analysis,” |
| | | | Microbiology, 140: 3099-3108 (1994) |
| X80629 | 16S rDNA | 16S ribosomal RNA | Rainey, F. A. et al. “Phylogenetic analysis of the genera Rhodococcus and |
| | | | Norcardia and evidence for the evolutionary origin of the genus Norcardia |
| | | | from within the radiation of Rhodococcus species,” Microbiol., 141: 523-528 |
| | | | (1995) |
| X81191 | gluA; gluB; gluC; | Glutamate uptake system | Kronemeyer, W. et al. “Structure of the gluABCD cluster encoding the |
| | gluD | | glutamate uptake system of Corynebacterium glutamicum,” J. Bacteriol., |
| | | | 177(5): 1152-1158 (1995) |
| X81379 | dapE | Succinyldiaminopimelate desuccinylase | Wehrmann, A. et al. “Analysis of different DNA fragments of |
| | | | Corynebacterium glutamicum complementing dapE of Escherichia coli,” |
| | | | Microbiology, 40: 3349-56 (1994) |
| X82061 | 16S rDNA | 16S ribosomal RNA | Ruimy, R. et al. “Phylogeny of the genus Corynebacterium deduced from |
| | | | analyses of small-subunit ribosomal DNA sequences,” Int. J. Syst. Bacteriol., |
| | | | 45(4): 740-746 (1995) |
| X82928 | asd; lysC | Aspartate-semialdehyde dehydrogenase; ? | Serebrijski, I. et al. “Multicopy suppression by asd gene and osmotic stress- |
| | | | dependent complementation by heterologous proA in proA mutants,” J. |
| | | | Bacteriol., 177(24): 7255-7260 (1995) |
| X82929 | proA | Gamma-glutamyl phosphate reductase | Serebrijski, I. et al. “Multicopy suppression by asd gene and osmotic stress- |
| | | | dependent complementation by heterologous proA in proA mutants,” J. |
| | | | Bacteriol., 177(24): 7255-7260 (1995) |
| X84257 | 16S rDNA | 16S ribosomal RNA | Pascual, C. et al. “Phylogenetic analysis of the genus Corynebacterium based |
| | | | on 16S rRNA gene sequences,” Int. J. Syst. Bacteriol., 45(4): 724-728 (1995) |
| X85965 | aroP; dapE | Aromatic amino acid permease; ? | Wehrmann, A. et al. “Functional analysis of sequences adjacent to dapE of |
| | | | Corynebacterium glutamicumproline reveals the presence of aroP, which |
| | | | encodes the aromatic amino acid transporter,” J. Bacteriol., 177(20): 5991-5993 |
| | | | (1995) |
| X86157 | argB; argC; argD; | Acetylglutamate kinase; N-acetyl-gamma- | Sakanyan, V. et al. “Genes and enzymes of the acetyl cycle of arginine |
| | argF; argJ | glutamyl-phosphate reductase; | biosynthesis in Corynebacterium glutamicum: enzyme evolution in the early |
| | | acetylornithine aminotransferase; ornithine | steps of the arginine pathway,” Microbiology, 142: 99-108 (1996) |
| | | carbamoyltransferase; glutamate N- | |
| | | acetyltransferase | |
| X89084 | pta; ackA | Phosphate acetyltransferase; acetate kinase | Reinscheid, D. J. et al. “Cloning, sequence analysis, expression and inactivation |
| | | | of the Corynebacterium glutamicum pta-ack operon encoding |
| | | | phosphotransacetylase and acetate kinase,” Microbiology, 145: 503-513 (1999) |
| X89850 | attB | Attachment site | Le Marrec, C. et al. “Genetic characterization of site-specific integration |
| | | | functions of phi AAU2 infecting “Arthrobacter aureus C70,” J. Bacteriol., |
| | | | 178(7): 1996-2004 (1996) |
| X90356 | | Promoter fragment F1 | Patek, M. et al. “Promoters from Corynebacterium glutamicum: cloning, |
| | | | molecular analysis and search for a consensus motif,” Microbiology, |
| | | | 142: 1297-1309 (1996) |
| X90357 | | Promoter fragment F2 | Patek, M. et al. “Promoters from Corynebacterium glutamicum: cloning, |
| | | | molecular analysis and search for a consensus motif,” Microbiology, |
| | | | 142: 1297-1309 (1996) |
| X90358 | | Promoter fragment F10 | Patek, M. et al. “Promoters from Corynebacterium glutamicum: cloning, |
| | | | molecular analysis and search for a consensus motif,” Microbiology, |
| | | | 142: 1297-1309 (1996) |
| X90359 | | Promoter fragment F13 | Patek, M. et al. “Promoters from Corynebacterium glutamicum: cloning, |
| | | | molecular analysis and search for a consensus motif,” Microbiology, |
| | | | 142: 1297-1309 (1996) |
| X90360 | | Promoter fragment F22 | Patek, M. et al. “Promoters from Corynebacterium glutamicum: cloning, |
| | | | molecular analysis and search for a consensus motif,” Microbiology, |
| | | | 142: 1297-1309 (1996) |
| X90361 | | Promoter fragment F34 | Patek, M. et al. “Promoters from Corynebacterium glutamicum: cloning, |
| | | | molecular analysis and search for a consensus motif,” Microbiology, |
| | | | 142: 1297-1309 (1996) |
| X90362 | | Promoter fragment F37 | Patek, M. et al. “Promoters from Corynebacterium glutamicum: cloning, |
| | | | molecular analysis and search for a consensus motif,” Microbiology, |
| | | | 142: 1297-1309 (1996) |
| X90363 | | Promoter fragment F45 | Patek, M. et al. “Promoters from Corynebacterium glutamicum: cloning, |
| | | | molecular analysis and search for a consensus motif,” Microbiology, |
| | | | 142: 1297-1309 (1996) |
| X90364 | | Promoter fragment F64 | Patek, M. et al. “Promoters from Corynebacterium glutamicum: cloning, |
| | | | molecular analysis and search for a consensus motif,” Microbiology, |
| | | | 142: 1297-1309 (1996) |
| X90365 | | Promoter fragment F75 | Patek, M. et al. “Promoters from Corynebacterium glutamicum: cloning, |
| | | | molecular analysis and search for a consensus motif,” Microbiology, |
| | | | 142: 1297-1309 (1996) |
| X90366 | | Promoter fragment PF101 | Patek, M. et al. “Promoters from Corynebacterium glutamicum: cloning, |
| | | | molecular analysis and search for a consensus motif,” Microbiology, |
| | | | 142: 1297-1309 (1996) |
| X90367 | | Promoter fragment PF104 | Patek, M. et al. “Promoters from Corynebacterium glutamicum: cloning, |
| | | | molecular analysis and search for a consensus motif,” Microbiology, |
| | | | 142: 1297-1309 (1996) |
| X90368 | | Promoter fragment PF109 | Patek, M. et al. “Promoters from Corynebacterium glutamicum: cloning, |
| | | | molecular analysis and search for a consensus motif,” Microbiology, |
| | | | 142: 1297-1309 (1996) |
| X93513 | amt | Ammonium transport system | Siewe, R. M. et al. “Functional and genetic characterization of the (methyl) |
| | | | ammonium uptake carrier of Corynebacterium glutamicum,” J. Biol. Chem., |
| | | | 271(10): 5398-5403 (1996) |
| X93514 | betP | Glycine betaine transport system | Peter, H. et al. “Isolation, characterization, and expression of the |
| | | | Corynebacterium glutamicum betP gene, encoding the transport system for the |
| | | | compatible solute glycine betaine,” J. Bacteriol., 178(17): 5229-5234 (1996) |
| X95649 | orf4 | | Patek, M. et al. “Identification and transcriptional analysis of the dapB-ORF2- |
| | | | dapA-ORF4 operon of Corynebacterium glutamicum, encoding two enzymes |
| | | | involved in L-lysine synthesis,” Biotechnol. Lett., 19: 1113-1117 (1997) |
| X96471 | lysE; lysG | Lysine exporter protein; Lysine export | Vrljic, M. et al. “A new type of transporter with a new type of cellular |
| | | regulator protein | function: L-lysine export from Corynebacterium glutamicum,” Mol. |
| | | | Microbiol., 22(5): 815-826 (1996) |
| X96580 | panB; panC; xylB | 3-methyl-2-oxobutanoate | Sahm, H. et al. “D-pantothenate synthesis in Corynebacterium glutamicum and |
| | | hydroxymethyltransferase; pantoate-beta- | use of panBC and genes encoding L-valine synthesis for D-pantothenate |
| | | alanine ligase; xylulokinase | overproduction,” Appl. Environ. Microbiol., 65(5): 1973-1979 (1999) |
| X96962 | | Insertion sequence IS1207 and transposase | |
| X99289 | | Elongation factor P | Ramos, A. et al. “Cloning, sequencing and expression of the gene encoding |
| | | | elongation factor P in the amino-acid producer Brevibacterium lactofermentum |
| | | | (Corynebacterium glutamicum ATCC 13869),” Gene, 198: 217-222 (1997) |
| Y00140 | thrB | Homoserine kinase | Mateos, L. M. et al. “Nucleotide sequence of the homoserine kinase (thrB) gene |
| | | | of the Brevibacterium lactofermentum,” Nucleic Acids Res., 15(9): 3922 (1987) |
| Y00151 | ddh | Meso-diaminopimelate D-dehydrogenase | Ishino, S. et al. “Nucleotide sequence of the meso-diaminopimelate D- |
| | | (EC 1.4.1.16) | dehydrogenase gene from Corynebacterium glutamicum,” Nucleic Acids Res., |
| | | | 15(9): 3917 (1987) |
| Y00476 | thrA | Homoserine dehydrogenase | Mateos, L. M. et al. “Nucleotide sequence of the homoserine dehydrogenase |
| | | | (thrA) gene of the Brevibacterium lactofermentum,” Nucleic Acids Res., |
| | | | 15(24): 10598 (1987) |
| Y00546 | hom; thrB | Homoserine dehydrogenase; homoserine | Peoples, O. P. et al. “Nucleotide sequence and fine structural analysis of the |
| | | kinase | Corynebacterium glutamicum hom-thrB operon,” Mol. Microbiol., 2(1): 63-72 |
| | | | (1988) |
| Y08964 | murC; ftsQ/divD; ftsZ | UPD-N-acetylmuramate-alanine ligase; | Honrubia, M. P. et al. “Identification, characterization, and chromosomal |
| | | division initiation protein or cell division | organization of the ftsZ gene from Brevibacterium lactofermentum,” Mol. Gen. |
| | | protein; cell division protein | Genet., 259(1): 97-104 (1998) |
| Y09163 | putP | High affinity proline transport system | Peter, H. et al. “Isolation of the putP gene of Corynebacterium |
| | | | glutamicumproline and characterization of a low-affinity uptake system for |
| | | | compatible solutes,” Arch. Microbiol., 168(2): 143-151 (1997) |
| Y09548 | pyc | Pyruvate carboxylase | Peters-Wendisch, P. G. et al. “Pyruvate carboxylase from Corynebacterium |
| | | | glutamicum: characterization, expression and inactivation of the pyc gene,” |
| | | | Microbiology, 144: 915-927 (1998) |
| Y09578 | leuB | 3-isopropylmalate dehydrogenase | Patek, M. et al. “Analysis of the leuB gene from Corynebacterium |
| | | | glutamicum,” Appl. Microbiol. Biotechnol., 50(1): 42-47 (1998) |
| Y12472 | | Attachment site bacteriophage Phi-16 | Moreau, S. et al. “Site-specific integration of corynephage Phi-16: The |
| | | | construction of an integration vector,” Microbiol., 145: 539-548 (1999) |
| Y12537 | proP | Proline/ectoine uptake system protein | Peter, H. et al. “Corynebacterium glutamicum is equipped with four secondary |
| | | | carriers for compatible solutes: Identification, sequencing, and characterization |
| | | | of the proline/ectoine uptake system, ProP, and the ectoine/proline/glycine |
| | | | betaine carrier, EctP,” J. Bacteriol., 180(22): 6005-6012 (1998) |
| Y13221 | glnA | Glutamine synthetase I | Jakoby, M. et al. “Isolation of Corynebacterium glutamicum glnA gene |
| | | | encoding glutamine synthetase I,” FEMS Microbiol. Lett., 154(1): 81-88 (1997) |
| Y16642 | lpd | Dihydrolipoamide dehydrogenase | |
| Y18059 | | Attachment site Corynephage 304L | Moreau, S. et al. “Analysis of the integration functions of &phi; 304L: An |
| | | | integrase module among corynephages,” Virology, 255(1): 150-159 (1999) |
| Z21501 | argS; lysA | Arginyl-tRNA synthetase; diaminopimelate | Oguiza, J. A. et al. “A gene encoding arginyl-tRNA synthetase is located in the |
| | | decarboxylase (partial) | upstream region of the lysA gene in Brevibacterium lactofermentum: |
| | | | Regulation of argS-lysA cluster expression by arginine,” J. |
| | | | Bacteriol., 175(22): 7356-7362 (1993) |
| Z21502 | dapA; dapB | Dihydrodipicolinate synthase; | Pisabarro, A. et al. “A cluster of three genes (dapA, orf2, and dapB) of |
| | | dihydrodipicolinate reductase | Brevibacterium lactofermentum encodes dihydrodipicolinate reductase, and a |
| | | | third polypeptide of unknown function,” J. Bacteriol., 175(9): 2743-2749 |
| | | | (1993) |
| Z29563 | thrC | Threonine synthase | Malumbres, M. et al. “Analysis and expression of the thrC gene of the encoded |
| | | | threonine synthase,” Appl. Environ. Microbiol., 60(7)2209-2219 (1994) |
| Z46753 | 16S rDNA | Gene for 16S ribosomal RNA | |
| Z49822 | sigA | SigA sigma factor | Oguiza, J. A. et al “Multiple sigma factor genes in Brevibacterium |
| | | | lactofermentum: Characterization of sigA and sigB,” J. Bacteriol., 178(2): 550-553 |
| | | | (1996) |
| Z49823 | galE; dtxR | Catalytic activity UDP-galactose 4- | Oguiza, J. A. et al “The galE gene encoding the UDP-galactose 4-epimerase of |
| | | epimerase; diphtheria toxin regulatory | Brevibacterium lactofermentum is coupled transcriptionally to the dmdR |
| | | protein | gene,” Gene, 177: 103-107 (1996) |
| Z49824 | orf1; sigB | ?; SigB sigma factor | Oguiza, J. A. et al “Multiple sigma factor genes in Brevibacterium |
| | | | lactofermentum: Characterization of sigA and sigB,” J. Bacteriol., 178(2): 550-553 |
| | | | (1996) |
| Z66534 | | Transposase | Correia, A. et al. “Cloning and characterization of an IS-like element present in |
| | | | the genome of Brevibacterium lactofermentum ATCC 13869,” Gene, |
| | | | 170(1): 91-94 (1996) |

ⁱA sequence for this gene was published in the indicated reference. However, the sequence obtained by the inventors of the present application is significantly longer than the published version. It is believed that the published version relied on an incorrect start codon, and thus represents only a fragment of the actual coding region.

[0195] TABLE 3
Corynebacterium and Brevibacterium Strains Which May be Used in the Practice of the Invention

| Genus | species | ATCC | FERM | NRRL | CECT | NCIMB | CBS | NCTC | DSMZ |
|---|---|---|---|---|---|---|---|---|---|
| Brevibacterium | ammoniagenes | 21054 | | | | | | | |
| Brevibacterium | ammoniagenes | 19350 | | | | | | | |
| Brevibacterium | ammoniagenes | 19351 | | | | | | | |
| Brevibacterium | ammoniagenes | 19352 | | | | | | | |
| Brevibacterium | ammoniagenes | 19353 | | | | | | | |
| Brevibacterium | ammoniagenes | 19354 | | | | | | | |
| Brevibacterium | ammoniagenes | 19355 | | | | | | | |
| Brevibacterium | ammoniagenes | 19356 | | | | | | | |
| Brevibacterium | ammoniagenes | 21055 | | | | | | | |
| Brevibacterium | ammoniagenes | 21077 | | | | | | | |
| Brevibacterium | ammoniagenes | 21553 | | | | | | | |
| Brevibacterium | ammoniagenes | 21580 | | | | | | | |
| Brevibacterium | ammoniagenes | 39101 | | | | | | | |
| Brevibacterium | butanicum | 21196 | | | | | | | |
| Brevibacterium | divaricatum | 21792 | P928 | | | | | | |
| Brevibacterium | flavum | 21474 | | | | | | | |
| Brevibacterium | flavum | 21129 | | | | | | | |
| Brevibacterium | flavum | 21518 | | | | | | | |
| Brevibacterium | flavum | | | B11474 | | | | | |
| Brevibacterium | flavum | | | B11472 | | | | | |
| Brevibacterium | flavum | 21127 | | | | | | | |
| Brevibacterium | flavum | 21128 | | | | | | | |
| Brevibacterium | flavum | 21427 | | | | | | | |
| Brevibacterium | flavum | 21475 | | | | | | | |
| Brevibacterium | flavum | 21517 | | | | | | | |
| Brevibacterium | flavum | 21528 | | | | | | | |
| Brevibacterium | flavum | 21529 | | | | | | | |
| Brevibacterium | flavum | | | B11477 | | | | | |
| Brevibacterium | flavum | | | B11478 | | | | | |
| Brevibacterium | flavum | 21127 | | | | | | | |
| Brevibacterium | flavum | | | B11474 | | | | | |
| Brevibacterium | healii | 15527 | | | | | | | |
| Brevibacterium | ketoglutamicum | 21004 | | | | | | | |
| Brevibacterium | ketoglutamicum | 21089 | | | | | | | |
| Brevibacterium | ketosoreductum | 21914 | | | | | | | |
| Brevibacterium | lactofermentum | | | | 70 | | | | |
| Brevibacterium | lactofermentum | | | | 74 | | | | |
| Brevibacterium | lactofermentum | | | | 77 | | | | |
| Brevibacterium | lactofermentum | 21798 | | | | | | | |
| Brevibacterium | lactofermentum | 21799 | | | | | | | |
| Brevibacterium | lactofermentum | 21800 | | | | | | | |
| Brevibacterium | lactofermentum | 21801 | | | | | | | |
| Brevibacterium | lactofermentum | | | B11470 | | | | | |
| Brevibacterium | lactofermentum | | | B11471 | | | | | |
| Brevibacterium | lactofermentum | 21086 | | | | | | | |
| Brevibacterium | lactofermentum | 21420 | | | | | | | |
| Brevibacterium | lactofermentum | 21086 | | | | | | | |
| Brevibacterium | lactofermentum | 31269 | | | | | | | |
| Brevibacterium | linens | 9174 | | | | | | | |
| Brevibacterium | linens | 19391 | | | | | | | |
| Brevibacterium | linens | 8377 | | | | | | | |
| Brevibacterium | paraffinolyticum | | | | | 11160 | | | |
| Brevibacterium | spec. | | | | | | 717.73 | | |
| Brevibacterium | spec. | | | | | | 717.73 | | |
| Brevibacterium | spec. | 14604 | | | | | | | |
| Brevibacterium | spec. | 21860 | | | | | | | |
| Brevibacterium | spec. | 21864 | | | | | | | |
| Brevibacterium | spec. | 21865 | | | | | | | |
| Brevibacterium | spec. | 21866 | | | | | | | |
| Brevibacterium | spec. | 19240 | | | | | | | |
| Corynebacterium | acetoacidophilum | 21476 | | | | | | | |
| Corynebacterium | acetoacidophilum | 13870 | | | | | | | |
| Corynebacterium | acetoglutamicum | | | B11473 | | | | | |
| Corynebacterium | acetoglutamicum | | | B11475 | | | | | |
| Corynebacterium | acetoglutamicum | 15806 | | | | | | | |
| Corynebacterium | acetoglutamicum | 21491 | | | | | | | |
| Corynebacterium | acetoglutamicum | 31270 | | | | | | | |
| Corynebacterium | acetophilum | | | B3671 | | | | | |
| Corynebacterium | ammoniagenes | 6872 | | | | | | 2399 | |
| Corynebacterium | ammoniagenes | 15511 | | | | | | | |
| Corynebacterium | fujiokense | 21496 | | | | | | | |
| Corynebacterium | glutamicum | 14067 | | | | | | | |
| Corynebacterium | glutamicum | 39137 | | | | | | | |
| Corynebacterium | glutamicum | 21254 | | | | | | | |
| Corynebacterium | glutamicum | 21255 | | | | | | | |
| Corynebacterium | glutamicum | 31830 | | | | | | | |
| Corynebacterium | glutamicum | 13032 | | | | | | | |
| Corynebacterium | glutamicum | 14305 | | | | | | | |
| Corynebacterium | glutamicum | 15455 | | | | | | | |
| Corynebacterium | glutamicum | 13058 | | | | | | | |
| Corynebacterium | glutamicum | 13059 | | | | | | | |
| Corynebacterium | glutamicum | 13060 | | | | | | | |
| Corynebacterium | glutamicum | 21492 | | | | | | | |
| Corynebacterium | glutamicum | 21513 | | | | | | | |
| Corynebacterium | glutamicum | 21526 | | | | | | | |
| Corynebacterium | glutamicum | 21543 | | | | | | | |
| Corynebacterium | glutamicum | 13287 | | | | | | | |
| Corynebacterium | glutamicum | 21851 | | | | | | | |
| Corynebacterium | glutamicum | 21253 | | | | | | | |
| Corynebacterium | glutamicum | 21514 | | | | | | | |
| Corynebacterium | glutamicum | 21516 | | | | | | | |
| Corynebacterium | glutamicum | 21299 | | | | | | | |
| Corynebacterium | glutamicum | 21300 | | | | | | | |
| Corynebacterium | glutamicum | 39684 | | | | | | | |
| Corynebacterium | glutamicum | 21488 | | | | | | | |
| Corynebacterium | glutamicum | 21649 | | | | | | | |
| Corynebacterium | glutamicum | 21650 | | | | | | | |
| Corynebacterium | glutamicum | 19223 | | | | | | | |
| Corynebacterium | glutamicum | 13869 | | | | | | | |
| Corynebacterium | glutamicum | 21157 | | | | | | | |
| Corynebacterium | glutamicum | 21158 | | | | | | | |
| Corynebacterium | glutamicum | 21159 | | | | | | | |
| Corynebacterium | glutamicum | 21355 | | | | | | | |
| Corynebacterium | glutamicum | 31808 | | | | | | | |
| Corynebacterium | glutamicum | 21674 | | | | | | | |
| Corynebacterium | glutamicum | 21562 | | | | | | | |
| Corynebacterium | glutamicum | 21563 | | | | | | | |
| Corynebacterium | glutamicum | 21564 | | | | | | | |
| Corynebacterium | glutamicum | 21565 | | | | | | | |
| Corynebacterium | glutamicum | 21566 | | | | | | | |
| Corynebacterium | glutamicum | 21567 | | | | | | | |
| Corynebacterium | glutamicum | 21568 | | | | | | | |
| Corynebacterium | glutamicum | 21569 | | | | | | | |
| Corynebacterium | glutamicum | 21570 | | | | | | | |
| Corynebacterium | glutamicum | 21571 | | | | | | | |
| Corynebacterium | glutamicum | 21572 | | | | | | | |
| Corynebacterium | glutamicum | 21573 | | | | | | | |
| Corynebacterium | glutamicum | 21579 | | | | | | | |
| Corynebacterium | glutamicum | 19049 | | | | | | | |
| Corynebacterium | glutamicum | 19050 | | | | | | | |
| Corynebacterium | glutamicum | 19051 | | | | | | | |
| Corynebacterium | glutamicum | 19052 | | | | | | | |
| Corynebacterium | glutamicum | 19053 | | | | | | | |
| Corynebacterium | glutamicum | 19054 | | | | | | | |
| Corynebacterium | glutamicum | 19055 | | | | | | | |
| Corynebacterium | glutamicum | 19056 | | | | | | | |
| Corynebacterium | glutamicum | 19057 | | | | | | | |
| Corynebacterium | glutamicum | 19058 | | | | | | | |
| Corynebacterium | glutamicum | 19059 | | | | | | | |
| Corynebacterium | glutamicum | 19060 | | | | | | | |
| Corynebacterium | glutamicum | 19185 | | | | | | | |
| Corynebacterium | glutamicum | 13286 | | | | | | | |
| Corynebacterium | glutamicum | 21515 | | | | | | | |
| Corynebacterium | glutamicum | 21527 | | | | | | | |
| Corynebacterium | glutamicum | 21544 | | | | | | | |
| Corynebacterium | glutamicum | 21492 | | | | | | | |
| Corynebacterium | glutamicum | | | B8183 | | | | | |
| Corynebacterium | glutamicum | | | B8182 | | | | | |
| Corynebacterium | glutamicum | | | B12416 | | | | | |
| Corynebacterium | glutamicum | | | B12417 | | | | | |
| Corynebacterium | glutamicum | | | B12418 | | | | | |
| Corynebacterium | glutamicum | | | B11476 | | | | | |
| Corynebacterium | glutamicum | 21608 | | | | | | | |
| Corynebacterium | lilium | | P973 | | | | | | |
| Corynebacterium | nitrilophilus | 21419 | | | | 11594 | | | |
| Corynebacterium | spec. | | P4445 | | | | | | |
| Corynebacterium | spec. | | P4446 | | | | | | |
| Corynebacterium | spec. | 31088 | | | | | | | |
| Corynebacterium | spec. | 31089 | | | | | | | |
| Corynebacterium | spec. | 31090 | | | | | | | |
| Corynebacterium | spec. | 31090 | | | | | | | |
| Corynebacterium | spec. | 31090 | | | | | | | |
| Corynebacterium | spec. | 15954 | | | | | | | 20145 |
| Corynebacterium | spec. | 21857 | | | | | | | |
| Corynebacterium | spec. | 21862 | | | | | | | |
| Corynebacterium | spec. | 21863 | | | | | | | |

ATCC: American Type Culture Collection, Rockville, MD, USA
FERM: Fermentation Research Institute, Chiba, Japan
NRRL: ARS Culture Collection, Northern Regional Research Laboratory, Peoria, IL, USA
CECT: Coleccion Espanola de Cultivos Tipo, Valencia, Spain
NCIMB: National Collection of Industrial and Marine Bacteria Ltd., Aberdeen, UK
CBS: Centraalbureau voor Schimmelcultures, Baarn, NL
NCTC: National Collection of Type Cultures, London, UK
DSMZ: Deutsche Sammlung von Mikroorganismen und Zellkulturen, Braunschweig, Germany
For reference see Sugawara, H. et al. (1993) World directory of collections of cultures of microorganisms: Bacteria, fungi and yeasts (4^{th} edn), World federation for culture collections world data center on microorganisms, Saimata, Japen.

[0196] TABLE 4
ALIGNMENT RESULTS

| | | | | | | | % | |
|---|---|---|---|---|---|---|---|---|
| | length | | | | | | homology | Date of |
| ID # | (NT) | Genbank Hit | Length | Accession | Name of Genbank Hit | Source of Genbank Hit | (GAP) | Deposit |
| rxa00005 | 1731 | GB_BA1:CGGLNA | 3686 | Y13221 | Corynebacterium glutamicum glnA gene. | Corynebacterium glutamicum | 37,555 | 28-Aug-97 |
| | | GB_BA1:CGPROMF45 | 60 | X90363 | C. glutamicum DNA for promoter fragment F45. | Corynebacterium glutamicum | 100,000 | 4-Nov-96 |
| | | GB_BA1:CGGLNA | 3686 | Y13221 | Corynebacterium glutamicum glnA gene. | Corynebacterium glutamicum | 37,251 | 28-Aug-97 |
| rxa00011 | 480 | GB_BA1:D86821 | 5585 | D86821 | Streptomyces coelicolor DNA for PkaA, PkaB and PrfB, complete cds. | Streptomyces coelicolor | 69,729 | 7-Feb-99 |
| | | GB_BA1:MTCY164 | 39150 | Z95150 | Mycobacterium tuberculosis H37Rv complete genome; segment 135/162. | Mycobacterium tuberculosis | 35,639 | 19-Jun-98 |
| | | GB_BA1:MLCB1779 | 43254 | Z98271 | Mycobacterium leprae cosmid B1779. | Mycobacterium leprae | 37,555 | 8-Aug-97 |
| rxa00012 | 999 | GB_BA1:D86821 | 5585 | D86821 | Streptomyces coelicolor DNA for PkaA, PkaB and PrfB, complete cds. | Streptomyces coelicolor | 63,089 | 7-Feb-99 |
| | | GB_BA1:MTCY164 | 39150 | Z95150 | Mycobacterium tuberculosis H37Rv complete genome; segment 135/162. | Mycobacterium tuberculosis | 38,985 | 19-Jun-98 |
| | | GB_BA1:MLCB1779 | 43254 | Z98271 | Mycobacterium leprae cosmid B1779. | Mycobacterium leprae | 37,448 | 8-Aug-97 |
| rxa00016 | 1017 | GB_BA1:CGISABL | 1290 | X69104 | C. glutamicum IS3 related insertion element. | Corynebacterium glutamicum | 82,891 | 9-Aug-95 |
| | | GB_PAT:E12760 | 1279 | E12760 | DNA encoding Brevibacterium transposase. | Corynebacterium glutamicum | 83,201 | 24-Jun-98 |
| | | GB_PAT:AR038104 | 1279 | AR038104 | Sequence 9 from patent U.S. Pat. No. 5804414. | Unknown. | 83,201 | 29-Sep-99 |
| rxa00017 | 417 | GB_BA1:CGISABL | 1290 | X69104 | C. glutamicum IS3 related insertion element. | Corynebacterium glutamicum | 78,947 | 9-Aug-95 |
| | | GB_PAT:E12760 | 1279 | E12760 | DNA encoding Brevibacterium transposase. | Corynebacterium glutamicum | 77,895 | 24-Jun-98 |
| | | GB_PAT:AR038104 | 1279 | AR038104 | Sequence 9 from patent U.S. Pat. No. 5804414. | Unknown. | 77,895 | 29-Sep-99 |
| rxa00019 | 1983 | GB_PR3:HSN20A6 | 30875 | Z69713 | Human DNA sequence from cosmid cN20A6, on chromosome 22 contains STS, | Homo sapiens | 37,596 | 23-Nov-99 |
| | | GB_HTG3:AC011577 | 151996 | AC011577 | Homo sapiens clone 12_P_19, LOW-PASS SEQUENCE SAMPLING. | Homo sapiens | 34,506 | 07-OCT- |
| | | | | | | | | 1999 |
| | | GB_EST37:AW000587 | 470 | AW000587 | 614056A09.x1 614 - root cDNA library from Walbot Lab Zea mays cDNA, mRNA | Zea mays | 41,578 | 8-Sep-99 |
| | | | | | sequence. | | | |
| rxa00046 | 819 | GB_EST17:C73675 | 391 | C73675 | C73675 Rice panicle (longer than 10 cm) Oryza sativa cDNA clone E20126_2A, | Oryza sativa | 42,014 | 23-Sep-97 |
| | | | | | mRNA sequence. | | | |
| | | GB_EST31:AI704169 | 275 | AI704169 | UI-R-AC0-yi-d-08-0-UI.s1 UI-R-AC0 Rattus norvegicus cDNA clone UI-R-AC0-yi-d- | Rattus norvegicus | 38,182 | 3-Jun-99 |
| | | | | | 08-0-UI 3′, mRNA sequence. | | | |
| | | GB_EST35:AI846250 | 390 | AI846250 | UI-M-AK1-aez-b-06-0-UI.s1 NIH_BMAP_MHY_N Mus musculus cDNA clone UI-M- | Mus musculus | 34,872 | 15-Jul-99 |
| | | | | | AK1-aez-b-06-0-UI 3′, mRNA sequence. | | | |
| rxa00053 | 516 | GB_PL2:AF072675 | 3127 | AF072675 | Kluyveromyces lactis Hap4p (HAP4) gene, complete cds. | Kluyveromyces lactis | 36,914 | 13-MAR- |
| | | | | | | | | 1999 |
| | | GB_VI:AB010886 | 3387 | AB010886 | Cydia pomonella granulovirus genes for chitinase and cathepsin, complete cds. | Cydia pomonella granulovirus | 35,375 | 13-Feb-99 |
| | | GB_PR2:HS1177I5 | 96256 | AL022315 | Human DNA sequence from clone 1177I5 on chromosome 22q13.1. Contains part | Homo sapiens | 36,884 | 23-Nov-99 |
| | | | | | of a putative novel gene, the gene for serum constituent protein MSE55 | | | |
| | | | | | downstream of a putative CpG island and the LGALS2 gene for Lectin, Galactose- | | | |
| | | | | | binding, soluble, 2 (Galectin 2, S-Lac Lectin 2, HL14). Contains ESTs and GSSs, | | | |
| | | | | | complete sequence. | | | |
| rxa00057 | 222 | GB_BA1:CGISABL | 1290 | X69104 | C. glutamicum IS3 related insertion element. | Corynebacterium glutamicum | 61,261 | 9-Aug-95 |
| | | GB_PAT:AR038104 | 1279 | AR038104 | Sequence 9 from patent U.S. Pat. No. 5804414. | Unknown. | 66,512 | 29-Sep-99 |
| | | GB_PAT:E12760 | 1279 | E12760 | DNA encoding Brevibacterium transposase. | Corynebacterium glutamicum | 66,512 | 24-Jun-98 |
| rxa00069 | 1506 | GB_BA1:MTCY27 | 27548 | Z95208 | Mycobacterium tuberculosis H37Rv complete genome; segment 104/162. | Mycobacterium tuberculosis | 38,029 | 17-Jun-98 |
| | | GB_BA1:MSGB1229CS | 30670 | L78812 | Mycobacterium leprae cosmid B1229 DNA sequence. | Mycobacterium leprae | 64,940 | 15-Jun-96 |
| | | GB_BA1:MSGB998CS | 10000 | L78829 | Mycobacterium leprae cosmid B998 DNA sequence. | Mycobacterium leprae | 64,940 | 15-Jun-96 |
| rxa00102 | 891 | GB_PR3:HS45P21 | 170001 | AL021917 | Human DNA sequence from clone 45P21 on chromosome 6p21.3-22.2 Contains | Homo sapiens | 37,882 | 23-Nov-99 |
| | | | | | butyrophilins (BTF3, BTF5, BTF2, BTF4), EST, STS, complete sequence. | | | |
| | | GB_PR3:AC005330 | 40607 | AC005330 | Homo sapiens chromosome 19, cosmid R34047, complete sequence. | Homo sapiens | 35,666 | 28-Jul-98 |
| | | GB_GSS4:AQ677431 | 502 | AQ677431 | HS_5529_A2_C01_T7A RPCI-11 Human Male BAC Library Homo sapiens | Homo sapiens | 37,000 | 25-Jun-99 |
| | | | | | genomic clone Plate = 1105 Col = 2 Row = E, genomic survey sequence. | | | |
| rxa00107 | 360 | GB_PL2:AC007153 | 103223 | AC007153 | Arabidopsis thaliana chromosome I BAC F3F20 genomic sequence, complete | Arabidopsis thaliana | 33,427 | 17-MAY- |
| | | | | | sequence. | | | 1999 |
| | | GB_BA2:PPU89363 | 4642 | U89363 | Pseudomonas putida P38K, amidase, nitrile hydratase alpha subunit, nitrile | Pseudomonas putida | 40,988 | 2-Jun-98 |
| | | | | | hydratase beta subunit, and P14K genes, complete cds. | | | |
| | | GB_PAT:AR041193 | 1440 | AR041193 | Sequence 17 from patent U.S. Pat. No. 5811286. | Unknown. | 40,988 | 29-Sep-99 |
| rxa00125 | 888 | EM_PAT:E09053 | 2538 | E09053 | gDNA encoding secA protein. | Corynebacterium glutamicum | 94,028 | 07-OCT- |
| | | | | | | | | 1997 (Rel. |
| | | | | | | | | 52, |
| | | | | | | | | Created) |
| | | GB_BA1:MSU66081 | 2968 | U66081 | Mycobacterium smegmatis SecA (SecA) gene, complete cds. | Mycobacterium smegmatis | 71,216 | 28-Aug-96 |
| | | GB_BA2:SLU21192 | 4006 | U21192 | Streptomyces lividans SecA (secA) gene, complete cds. | Streptomyces lividans | 63,472 | 3-Sep-96 |
| rxa00138 | 684 | GB_BA1:BLELONP | 738 | X99289 | B. lactofermentum gene encoding elongation factor P. | Corynebacterium glutamicum | 98,331 | 1-Nov-97 |
| | | GB_BA1:MTCY159 | 33818 | Z83863 | Mycobacterium tuberculosis H37Rv complete genome; segment 111/162. | Mycobacterium tuberculosis | 37,946 | 17-Jun-98 |
| | | GB_BA1:MSGB937CS | 38914 | L78820 | Mycobacterium leprae cosmid B937 DNA sequence. | Mycobacterium leprae | 62,261 | 15-Jun-96 |
| rxa00172 | 735 | GB_EST28:AI484755 | 572 | AI484755 | EST243016 tomato ovary, TAMU Lycopersicon esculentum cDNA clone | Lycopersicon esculentum | 39,171 | 29-Jun-99 |
| | | | | | cLED3O13, mRNA sequence. | | | |
| | | GB_EST28:AI486041 | 610 | AI486041 | EST244362 tomato ovary, TAMU Lycopersicon esculentum cDNA clone cLED2K7, | Lycopersicon esculentum | 46,452 | 29-Jun-99 |
| | | | | | mRNA sequence. | | | |
| | | GB_PR3:HS396D17 | 152592 | AL008634 | Human DNA sequence from clone 396D17 on chromosome 1p33-35.3 Contains | Homo sapiens | 33,060 | 23-Nov-99 |
| | | | | | EST, STS, GSS, complete sequence. | | | |
| rxa00184 | 1296 | GB_BA1:MTCY50 | 36030 | Z77137 | Mycobacterium tuberculosis H37Rv complete genome; segment 55/162. | Mycobacterium tuberculosis | 47,823 | 17-Jun-98 |
| | | GB_BA1:AB013492 | 18497 | AB013492 | Bacillus halodurans C-125 genomic DNA, 9A/3S′ fragment, clone ALBAC001. | Bacillus halodurans | 39,234 | 3-Aug-99 |
| | | GB_PR3:AC005738 | 134506 | AC005738 | Homo sapiens chromosome 5, BAC clone 7g12 (LBNL H126), complete sequence. | Homo sapiens | 37,127 | 20-OCT- |
| | | | | | | | | 1998 |
| rxa00209 | 1614 | GB_BA1:MTV012 | 70287 | AL021287 | Mycobacterium tuberculosis H37Rv complete genome; segment 132/162. | Mycobacterium tuberculosis | 37,632 | 23-Jun-99 |
| | | GB_BA1:MLCB637 | 44882 | Z99263 | Mycobacterium leprae cosmid B637. | Mycobacterium leprae | 65,785 | 17-Sep-97 |
| | | GB_BA1:SC8D9 | 38681 | AL035569 | Streptomyces coelicolor cosmid 8D9. | Streptomyces coelicolor | 63,795 | 26-Feb-99 |
| rxa00210 | 420 | GB_PL1:MGR7031 | 103 | AJ007031 | Mycosphaerella graminicola microsatellite ST1A2 DNA. | Mycosphaerella graminicola | 45,545 | 3-Aug-98 |
| | | GB_HTG1:CEY48G10_4 | 110000 | AL021450 | Caenorhabditis elegans chromosome \|clone Y48G10, *** SEQUENCING IN | Caenorhabditis elegans | 37,101 | 29-Jul-99 |
| | | | | | PROGRESS ***, in unordered pieces. | | | |
| | | GB_HTG1:CEY48G10_4 | 110000 | AL021450 | Caenorhabditis elegans chromosome \|clone Y48G10, *** SEQUENCING IN | Caenorhabditis elegans | 37,101 | 29-Jul-99 |
| | | | | | PROGRESS ***, in unordered pieces. | | | |
| rxa00217 | 1218 | GB_BA1:MTV012 | 70287 | AL021287 | Mycobacterium tuberculosis H37Rv complete genome; segment 132/162. | Mycobacterium tuberculosis | 35,122 | 23-Jun-99 |
| | | GB_HTG2:AC008092 | 88749 | AC008092 | Drosophila melanogaster chromosome 3 clone BACR22F22 (D824) RPCI-98 | Drosophila melanogaster | 33,001 | 2-Aug-99 |
| | | | | | 22.F.22 map 84D-84D strain y; cn bw sp, *** SEQUENCING IN PROGRESS***, 53 | | | |
| | | | | | unordered pieces. | | | |
| | | GB_HTG2:AC008092 | 88749 | AC008092 | Drosophila melanogaster chromosome 3 clone BACR22F22 (D824) RPCI-98 | Drosophila melanogaster | 33,001 | 2-Aug-99 |
| | | | | | 22.F.22 map 84D-84D strain y; cn bw sp, *** SEQUENCING IN PROGRESS***, 53 | | | |
| | | | | | unordered pieces. | | | |
| rxa00227 | 921 | GB_BA1:LPLLDHE | 1651 | X70926 | L. plantarum gene for l-lactate dehydrogenase. | Lactobacillus plantarum | 37,294 | 17-Feb-94 |
| | | GB_GSS9:AQ158656 | 731 | AQ158656 | nbxb0011N08f CUGI Rice BAC Library Oryza sativa genomic clone nbxb0011N08f, | Oryza sativa | 39,041 | 12-Sep-98 |
| | | | | | genomic survey sequence. | | | |
| | | GB_BA1:LPLLDHE | 1651 | X70926 | L. plantarum gene for l-lactate dehydrogenase. | Lactobacillus plantarum | 34,947 | 17-Feb-94 |
| rxa00265 | 573 | GB_PR4:AC007368 | 94024 | AC007368 | Homo sapiens 12q24.2 PAC RPCI4-809F18 (Roswell Park Cancer Institute | Homo sapiens | 40,037 | 31-Jul-99 |
| | | | | | Human PAC Library) complete sequence. | | | |
| | | GB_PR4:AC007368 | 94024 | AC007368 | Homo sapiens 12q24.2 PAC RPCI4-809F18 (Roswell Park Cancer Institute | Homo sapiens | 36,121 | 31-Jul-99 |
| | | | | | Human PAC Library) complete sequence. | | | |
| rxa00280 | 624 | GB_EST29:AI588595 | 532 | AI588595 | fb97b04.y1 Zebrafish WashU MPIMG EST Danio rerio cDNA 5′ similar to | Danio rerio | 34,242 | 21-Apr-99 |
| | | | | | WP: F32D8.4 CE05783 LACTATE DEHYDROGENASE;, mRNA sequence. | | | |
| | | GB_VI:D78362 | 1593 | D78362 | Rotavirus sp. mRNA for nonstructural protein 1, complete cds. | Rotavirus sp. | 35,217 | 22-Jan-98 |
| | | GB_EST29:AI588595 | 532 | AI588595 | fb97b04.y1 Zebrafish WashU MPIMG EST Danio rerio cDNA 5′ similar to | Danio rerio | 36,118 | 21-Apr-99 |
| | | | | | WP: F32D8.4 CE05783 LACTATE DEHYDROGENASE;, mRNA sequence. | | | |
| rxa00314 | 1503 | GB_PAT:AR008345 | 1344 | AR008345 | Sequence 1 from patent U.S. Pat. No. 5753480. | Unknown. | 50,783 | 04-DEC- |
| | | | | | | | | 1998 |
| | | GB_BA1:ABIPDC | 4933 | X99587 | A. brasilense ipdC, gltX & cysS genes. | Azospirillum brasilense | 37,244 | 9-Jan-98 |
| | | GB_PAT:AR008346 | 333 | AR008346 | Sequence 3 from patent U.S. Pat. No. 5753480. | Unknown. | 64,545 | 04-DEC- |
| | | | | | | | | 1998 |
| rxa00331 | 480 | GB_BA1:CGTHRC | 3120 | X56037 | Corynebacterium glutamicum thrC gene for threonine synthase (EC4.2.99.2). | Corynebacterium glutamicum | 40,393 | 17-Jun-97 |
| | | GB_PAT:I09078 | 3146 | I09078 | Sequence 4 from Patent WO 8809819. | Unknown. | 38,462 | 02-DEC- |
| | | | | | | | | 1994 |
| | | GB_BA1:SAY14370 | 7791 | Y14370 | Staphylococcus aureus RF3, murE, ypfP genes. | Staphylococcus aureus | 34,526 | 24-Jun-98 |
| rxa00333 | 657 | GB_PR3:AC004788 | 39436 | AC004788 | Homo sapiens chromosome 7 clone UWGC: g1564a327 from 7p14-15, complete | Homo sapiens | 37,618 | 2-Jun-98 |
| | | | | | sequence. | | | |
| | | GB_PR3:AC004788 | 39436 | AC004788 | Homo sapiens chromosome 7 clone UWGC: g1564a327 from 7p14-15, complete | Homo sapiens | 34,169 | 2-Jun-98 |
| | | | | | sequence. | | | |
| rxa00454 | 1416 | GB_BA2:AE000147 | 10577 | AE000147 | Escherichia coli K-12 MG1655 section 37 of 400 of the complete genome. | Escherichia coli | 48,925 | 12-Nov-98 |
| | | GB_PR4:DJ270M14 | 192126 | AF107885 | Homo sapiens chromosome 14q24.3 clone BAC270M14 transforming growth factor | Homo sapiens | 36,043 | 14-Jul-99 |
| | | | | | beta 3 (TGF-beta 3) gene, complete cds; and unknown genes. | | | |
| | | GB_BA1:ECOTGT | 1823 | M63939 | E. coli tRNA-guanine-transglycosylase (tgt) gene, complete cds. | Escherichia coli | 48,925 | 26-APR- |
| | | | | | | | | 199 |
| rxa00458 | 736 | GB_BA1:SC4G2 | 30590 | AL031371 | Streptomyces coelicolor cosmid 4G2. | Streptomyces coelicolor | 34,836 | 5-Sep-98 |
| | | GB_BA2:AF024619 | 4038 | AF024619 | Pseudomonas fluorescens hybrid histidine kinase homolog (styS) and response | Pseudomonas fluorescens | 39,251 | 23-MAR- |
| | | | | | regulatory protein (styR) genes, complete cds. | | | 1998 |
| | | GB_BA1:SC4G2 | 30590 | AL031371 | Streptomyces coelicolor cosmid 4G2. | Streptomyces coelicolor | 40,196 | 5-Sep-98 |
| rxa00484 | 1203 | GB_PL1:AB012627 | 3019 | AB012627 | Adiantum capillus-veneris CRY2 mRNA for blue-light photoreceptor, complete cds. | Adiantum capillus-veneris | 43,959 | 5-Feb-99 |
| | | GB_PL1:AB012630 | 4098 | AB012630 | Adiantum capillus-veneris CRY2 gene for blue-light photoreceptor, complete cds. | Adiantum capillus-veneris | 39,765 | 5-Feb-99 |
| | | GB_PL1:YSCF6552A | 20383 | D31600 | Saccharomyces cerevisiae chromosome VI phage 6552. | Saccharomyces cerevisiae | 37,133 | 7-Feb-99 |
| rxa00495 | 687 | GB_HTG3:AC008853 | 54169 | AC008853 | Homo sapiens chromosome 5 clone CITB-H1_2176P21, *** SEQUENCING IN | Homo sapiens | 36,471 | 3-Aug-99 |
| | | | | | PROGRESS ***, 66 unordered pieces. | | | |
| | | GB_HTG3:AC008853 | 54169 | AC008853 | Homo sapiens chromosome 5 clone CITB-H1_2176P21, *** SEQUENCING IN | Homo sapiens | 36,471 | 3-Aug-99 |
| | | | | | PROGRESS ***, 66 unordered pieces. | | | |
| | | GB_HTG3:AC008853 | 54169 | AC008853 | Homo sapiens chromosome 5 clone CITB-H1_2176P21, *** SEQUENCING IN | Homo sapiens | 36,090 | 3-Aug-99 |
| | | | | | PROGRESS ***, 66 unordered pieces. | | | |
| rxa00532 | 608 | GB_BA1:ECR751 | 5499 | X54458 | E. coli plasmid R751 traF (5′end), traG, traH, traI, traJ, traK and traL (5′end) genes | Escherichia coli | 38,992 | 18-Nov-93 |
| | | | | | of the transfer region. | | | |
| | | GB_BA2:EAU67194 | 53339 | U67194 | Enterobacter aerogenes plasmid R751, complete plasmid sequence. | Enterobacter aerogenes | 38,992 | 19-OCT- |
| | | | | | | | | 1998 |
| | | GB_BA1:D83237 | 1626 | D83237 | Rhodococcus erythropolis DNA for catechol 1,2-dioxgenase, complete cds. | Rhodococcus erythropolis | 37,232 | 1-Sep-99 |
| rxa00539 | 600 | GB_PL2:AF053311 | 1110 | AF053311 | Zantedeschia aethiopica glutathione peroxidase (gpx) mRNA, nuclear gene | Zantedeschia aethiopica | 48,552 | 20-Nov-98 |
| | | | | | encoding chloroplast protein, complete cds. | | | |
| | | GB_PL2:AF053311 | 1110 | AF053311 | Zantedeschia aethiopica glutathione peroxidase (gpx) mRNA, nuclear gene | Zantedeschia aethiopica | 36,301 | 20-Nov-98 |
| | | | | | encoding chloroplast protein, complete cds. | | | |
| rxa00568 | 1470 | GB_PAT:I92046 | 2203 | I92046 | Sequence 13 from patent U.S. Pat. No. 5726299. | Unknown. | 37,129 | 01-DEC- |
| | | | | | | | | 1998 |
| | | GB_PAT:I78757 | 2203 | I78757 | Sequence 13 from patent U.S. Pat. No. 5693781. | Unknown. | 37,129 | 3-Apr-98 |
| | | GB_PR4:AC005042 | 192218 | AC005042 | Homo sapiens clone NH0552E01, complete sequence. | Homo sapiens | 37,672 | 14-Jan-99 |
| rxa00588 | 645 | GB_BA1:MTV017 | 67200 | AL021897 | Mycobacterium tuberculosis H37Rv complete genome; segment 48/162. | Mycobacterium tuberculosis | 36,150 | 24-Jun-99 |
| | | GB_BA1:PAU81259 | 7285 | U81259 | Pseudomonas aeruginosa dihydrodipicolinate reductase (dapB) gene, partial cds, | Pseudomonas aeruginosa | 45,483 | 23-DEC- |
| | | | | | carbamoylphosphate synthetase small subunit (carA) and carbamoylphosphate | | | 1996 |
| | | | | | synthetase large subunit (carB) genes, complete cds, and FtsJ homolog (ftsJ) | | | |
| | | | | | gene, partial cds. | | | |
| | | GB_IN2:AC005643 | 80389 | AC005643 | Drosophila melanogaster, chromosome 2R, region 50C5-50C8, P1 clone DS02972, | Drosophila melanogaster | 40,705 | 15-DEC- |
| | | | | | complete sequence. | | | 1998 |
| rxa00677 | 339 | GB_BA1:MLCB1222 | 34714 | AL049491 | Mycobacterium leprae cosmid B1222. | Mycobacterium leprae | 40,549 | 27-Aug-99 |
| | | GB_BA1:MBU15140 | 2136 | U15140 | Mycobacterium bovis ribosomal proteins IF-1 (infA), L36 (rpmJ), S13 (rpsM) and | Mycobacterium bovis | 64,881 | 28-OCT- |
| | | | | | S11 (rpsK) genes, complete cds, and S4 (rpsD) gene, partial cds. | | | 1996 |
| | | GB_BA1:MTY13E12 | 43401 | Z95390 | Mycobacterium tuberculosis H37Rv complete genome; segment 147/162. | Mycobacterium tuberculosis | 41,896 | 17-Jun-98 |
| rxa00687 | 1443 | GB_BA1:BRLSECY | 1516 | D14162 | Brevibacterium flavum gene for SecY protein (complete cds) and gene for | Corynebacterium glutamicum | 98,436 | 3-Feb-99 |
| | | | | | adenylate kinase (partial cds). | | | |
| | | GB_PAT:E07701 | 1323 | E07701 | Brevibacterium secY gene. | Corynebacterium glutamicum | 98,262 | 29-Sep-97 |
| | | GB_BA1:MTV041 | 28826 | AL021958 | Mycobacterium tuberculosis H37Rv complete genome; segment 35/162. | Mycobacterium tuberculosis | 60,724 | 17-Jun-98 |
| rxa00753 | 1704 | GB_EST17:C61980 | 216 | C61980 | C61980 Yuji Kohara unpublished cDNA Caenorhabditis elegans cDNA clone | Caenorhabditis elegans | 43,030 | 22-Sep-97 |
| | | | | | yk272b4 5′, mRNA sequence. | | | |
| | | GB_RO:MMANT12 | 5141 | X01815 | Mouse gene for H-2K(d) antigen. | Mus musculus | 37,317 | 03-OCT- |
| | | | | | | | | 1997 |
| | | GB_PR4:AC003001 | 101981 | AC003001 | Homo sapiens chromosome X, clone HRPC928E24, complete sequence. | Homo sapiens | 34,127 | 6-Feb-99 |
| rxa00824 | 681 | GB_PL2:ATFCA0 | 200576 | Z97335 | Arabidopsis thaliana DNA chromosome 4, ESSA I FCA contig fragment No. 0. | Arabidopsis thaliana | 36,527 | 28-Jun-99 |
| | | GB_PR4:AC006443 | 210636 | AC006443 | Homo sapiens chromosome 9, clone hRPK.494_N_15, complete sequence. | Homo sapiens | 38,401 | 30-Jan-99 |
| | | GB_PR4:AC006443 | 210636 | AC006443 | Homo sapiens chromosome 9, clone hRPK.494_N_15, complete sequence. | Homo sapiens | 34,027 | 30-Jan-99 |
| rxa00896 | 702 | GB_GSS12:AQ403148 | 432 | AQ403148 | HS_5052_A2_F07_SP6E RPCI-11 Human Male BAC Library Homo sapiens | Homo sapiens | 41,371 | 13-MAR- |
| | | | | | genomic clone Plate = 628 Col = 14 Row = K, genomic survey sequence. | | | 1999 |
| | | GB_HTG6:AC009921 | 184689 | AC009921 | Homo sapiens clone RP11-115O18, WORKING DRAFT SEQUENCE, 17 | Homo sapiens | 37,223 | 03-DEC- |
| | | | | | unordered pieces. | | | 1999 |
| | | GB_HTG6:AC009921 | 184689 | AC009921 | Homo sapiens clone RP11-115O18, WORKING DRAFT SEQUENCE, 17 | Homo sapiens | 38,438 | 03-DEC- |
| | | | | | unordered pieces. | | | 1999 |
| rxa00927 | 1212 | GB_BA1:MTCY227 | 35946 | Z77724 | Mycobacterium tuberculosis H37Rv complete genome; segment 114/162. | Mycobacterium tuberculosis | 36,493 | 17-Jun-98 |
| | | GB_BA1:U00011 | 40429 | U00011 | Mycobacterium leprae cosmid B1177. | Mycobacterium leprae | 37,978 | 01-MAR- |
| | | | | | | | | 1994 |
| | | GB_BA1:D90829 | 20277 | D90829 | E. coli genomic DNA, Kohara clone #337(41.9-42.3 min.). | Escherichia coli | 36,750 | 21-MAR- |
| | | | | | | | | 1997 |
| rxa00928 | 741 | GB_PR2:HS1121J18 | 138145 | AL031653 | Human DNA sequence from clone 1121J18 on chromosome 20. Contains ESTs, | Homo sapiens | 37,997 | 23-Nov-99 |
| | | | | | STS, GSSs, a ca repeat polymorphism and genomic marker D20S115′, complete | | | |
| | | | | | sequence. | | | |
| | | GB_PR2:HS1121J18 | 138145 | AL031653 | Human DNA sequence from clone 1121J18 on chromosome 20. Contains ESTs, | Homo sapiens | 38,701 | 23-Nov-99 |
| | | | | | STS, GSSs, a ca repeat polymorphism and genomic marker D20S115′, complete | | | |
| | | | | | sequence. | | | |
| | | GB_HTG3:AC008715 | 101012 | AC008715 | Homo sapiens chromosome 5 clone CIT978SKB_84H3, *** SEQUENCING IN | Homo sapiens | 38,199 | 3-Aug-99 |
| | | | | | PROGRESS ***, 24 unordered pieces. | | | |
| rxa00929 | 786 | GB_HTG3:AC004480 | 220000 | AC004480 | Homo sapiens chromosome 4, *** SEQUENCING IN PROGRESS ***, 7 unordered | Homo sapiens | 37,131 | 2-Sep-99 |
| | | | | | pieces. | | | |
| | | GB_HTG3:AC004480 | 220000 | AC004480 | Homo sapiens chromosome 4, *** SEQUENCING IN PROGRESS ***, 7 unordered | Homo sapiens | 37,131 | 2-Sep-99 |
| | | | | | pieces. | | | |
| | | GB_HTG3:AC004480 | 220000 | AC004480 | Homo sapiens chromosome 4, *** SEQUENCING IN PROGRESS ***, 7 unordered | Homo sapiens | 37,775 | 2-Sep-99 |
| | | | | | pieces. | | | |
| rxa00937 | 495 | GB_GSS3:B67258 | 592 | B67258 | T23N5TF TAMU Arabidopsis thaliana genomic clone T23N5, genomic survey | Arabidopsis thaliana | 35,644 | 09-DEC- |
| | | | | | sequence. | | | 1997 |
| | | GB_PL2:ATAC006413 | 96059 | AC006413 | Arabidopsis thaliana chromosome II BAC F5K7 genomic sequence, complete | Arabidopsis thaliana | 36,864 | 09-MAR- |
| | | | | | sequence. | | | 1999 |
| | | GB_EST8:AA052151 | 282 | AA052151 | mf81g03.r1 Soares mouse embryo NbME13.5 14.5 Mus musculus cDNA clone | Mus musculus | 38,652 | 13-Sep-96 |
| | | | | | IMAGE: 420724 5′, mRNA sequence. | | | |
| rxa00938 | 381 | GB_BA2:AF121000 | 19751 | AF121000 | Corynebacterium glutamicum strain 22243 R-plasmid pAG1, complete sequence. | Corynebacterium glutamicum | 39,410 | 14-Apr-99 |
| | | GB_BA1:FVBPOAD2A | 45519 | D26094 | Flavobacterium sp. plasmid pOAD2 DNA, whole sequence. | Flavobacterium sp. | 37,228 | 6-Feb-99 |
| | | GB_BA1:FVBPOAD2A | 45519 | D26094 | Flavobacterium sp. plasmid pOAD2 DNA, whole sequence. | Flavobacterium sp. | 63,102 | 6-Feb-99 |
| rxa00966 | 640 | GB_BA1:MLCB628 | 40789 | Y14967 | Mycobacterium leprae cosmid B628. | Mycobacterium leprae | 60,938 | 29-Aug-97 |
| | | GB_BA1:MLCB1770 | 37821 | Z70722 | Mycobacterium leprae cosmid B1770. | Mycobacterium leprae | 60,938 | 29-Aug-97 |
| | | GB_BA1:MTCY21D4 | 20760 | Z80775 | Mycobacterium tuberculosis H37Rv complete genome; segment 3/262. | Mycobacterium tuberculosis | 59,375 | 24-Jun-99 |
| rxa00968 | 1054 | GB_BA1:MSGY219 | 38721 | AD000013 | Mycobacterium tuberculosis sequence from clone y219. | Mycobacterium tuberculosis | 36,077 | 10-DEC- |
| | | | | | | | | 1996 |
| | | GB_BA1:MTCY21D4 | 20760 | Z80775 | Mycobacterium tuberculosis H37Rv complete genome; segment 3/262. | Mycobacterium tuberculosis | 67,536 | 24-Jun-99 |
| | | GB_BA1:MLCB628 | 40789 | Y14967 | Mycobacterium leprae cosmid B628. | Mycobacterium leprae | 65,990 | 29-Aug-97 |
| rxa00975 | 1773 | GB_PAT:E14508 | 3579 | E14508 | DNA encoding Brevibacterium diaminopimelic acid decarboxylase and arginyl- | Corynebacterium glutamicum | 99,887 | 28-Jul-99 |
| | | | | | tRNA synthase. | | | |
| | | GB_PAT:AR038110 | 3579 | AR038110 | Sequence 15 from patent U.S. Pat. No. 5804414. | Unknown. | 99,887 | 29-Sep-99 |
| | | GB_PAT:E16355 | 3579 | E16355 | Brevibacterium argS and lysA genes. | Corynebacterium glutamicum | 99,887 | 28-Jul-99 |
| rxa00978 | 738 | GB_PR2:HSAC000372 | 41730 | AC000372 | Human cosmid g1980a186, complete sequence. | Homo sapiens | 34,674 | 12-MAR- |
| | | | | | | | | 1997 |
| | | GB_PR3:AC005503 | 40998 | AC005503 | Homo sapiens clone UWGC:g5129s003 from 7q31, complete sequence. | Homo sapiens | 34,674 | 20-Aug-98 |
| | | GB_PR2:HSAC000372 | 41730 | AC000372 | Human cosmid g1980a186, complete sequence. | Homo sapiens | 38,881 | 12-MAR- |
| | | | | | | | | 1997 |
| rxa00985 | 2832 | GB_BA1:MTV008 | 63033 | AL021246 | Mycobacterium tuberculosis H37Rv complete genome; segment 108/162. | Mycobacterium tuberculosis | 38,126 | 17-Jun-98 |
| | | GB_BA1:BSVALTRS | 3168 | X77239 | B. subtilis valS gene. | Bacillus subtilis | 52,036 | 16-Apr-97 |
| | | GB_BA1:ECOUW93 | 338534 | U14003 | Escherichia coli K-12 chromosomal region from 92.8 to 00.1 minutes. | Escherichia coli | 37,971 | 17-Apr-96 |
| rxa00998 | 585 | GB_PAT:E13660 | 1916 | E13660 | gDNA encoding 6-phosphogluconate dehydrogenase. | Corynebacterium glutamicum | 38,398 | 24-Jun-98 |
| | | GB_HTG2:AF164115 | 94757 | AF164115 | Homo sapiens chromosome 8 clone BAC 644F11, *** SEQUENCING IN | Homo sapiens | 33,563 | 12-Jul-99 |
| | | | | | PROGRESS ***, in unordered pieces. | | | |
| | | GB_HTG2:AF164115 | 94757 | AF164115 | Homo sapiens chromosome 8 clone BAC 644F11, *** SEQUENCING IN | Homo sapiens | 33,563 | 12-Jul-99 |
| | | | | | PROGRESS ***, in unordered pieces. | | | |
| rxa01020 | 870 | GB_EST29:AI553731 | 416 | AI553731 | tn28b06.x1 NCI_CGAP_Brn25 Homo sapiens cDNA clone IMAGE: 2168915 3′ | Homo sapiens | 36,855 | 12-MAY- |
| | | | | | similar to contains element TAR1 TAR1 repetitive element;, mRNA sequence. | | | 1999 |
| | | GB_EST35:AI871115 | 506 | AI871115 | wI79c08.x1 NCI_CGAP_Brn25 Homo sapiens cDNA clone IMAGE: 2431118 3′ | Homo sapiens | 37,549 | 30-Aug-99 |
| | | | | | similar to TR: O75176 O75176 KIAA0692 PROTEIN; contains element MER15 | | | |
| | | | | | repetitive element;, mRNA sequence. | | | |
| | | GB_EST27:AI430328 | 520 | AI430328 | mf66a05.y1 Soares mouse embryo NbME13.5 14.5 Mus musculus cDNA clone | Mus musculus | 37,765 | 09-MAR- |
| | | | | | IMAGE: 419216 5′, mRNA sequence. | | | 1999 |
| rxa01061 | 1061 | GB_BA1:MTCY21D4 | 20760 | Z80775 | Mycobacterium tuberculosis H37Rv complete genome; segment 3/262. | Mycobacterium tuberculosis | 62,606 | 24-Jun-99 |
| | | GB_BA1:MSGY219 | 38721 | AD000013 | Mycobacterium tuberculosis sequence from clone y219. | Mycobacterium tuberculosis | 41,171 | 10-DEC- |
| | | | | | | | | 1996 |
| | | GB_BA1:MLCB628 | 40789 | Y14967 | Mycobacterium leprae cosmid B628. | Mycobacterium leprae | 61,022 | 29-Aug-97 |
| rxa01072 | 354 | GB_BA2:AF112535 | 4363 | AF112535 | Corynebacterium glutamicum putative glutaredoxin NrdH (nrdH), NrdI (nrdI), and | Corynebacterium glutamicum | 99,718 | 5-Aug-99 |
| | | | | | ribonucleotide reductase alpha-chain (nrdE) genes, complete cds. | | | |
| | | GB_BA1:CANRDFGEN | 6054 | Y09572 | Corynebacterium ammoniagenes nrdH, nrdI, nrdE, nrdF genes. | Corynebacterium | 62,393 | 18-Apr-98 |
| | | | | | | ammoniagenes | | |
| | | GB_BA1:MTCY22D7 | 31859 | Z83866 | Mycobacterium tuberculosis H37Rv complete genome; segment 133/162. | Mycobacterium tuberculosis | 37,714 | 17-Jun-98 |
| rxa01124 | 1602 | GB_BA1:SC1C2 | 42210 | AL031124 | Streptomyces coelicolor cosmid 1C2. | Streptomyces coelicolor | 60,616 | 15-Jan-99 |
| | | GB_BA1:MTV012 | 70287 | AL021287 | Mycobacterium tuberculosis H37Rv complete genome; segment 132/162. | Mycobacterium tuberculosis | 37,913 | 23-Jun-99 |
| | | GB_BA1:MLCB637 | 44882 | Z99263 | Mycobacterium leprae cosmid B637. | Mycobacterium leprae | 61,216 | 17-Sep-97 |
| rxa01199 | 871 | GB_PR3:AF046873 | 2153 | AF046873 | Homo sapiens synapsin IIIa mRNA, complete cds. | Homo sapiens | 37,184 | 28-Apr-98 |
| | | GB_EST30:AI649049 | 691 | AI649049 | uk34f03.x1 Sugano mouse kidney mkia Mus musculus cDNA clone | Mus musculus | 37,226 | 30-Apr-99 |
| | | | | | IMAGE: 1970909 3′ similar to gb: X15684 Mouse mRNA for liver-type glucose | | | |
| | | | | | transporter protein (MOUSE);, mRNA sequence. | | | |
| | | GB_EST23:AI121163 | 468 | AI121163 | ud70b04.x1 Sugano mouse liver mlia Mus musculus cDNA clone IMAGE: 1451215 | Mus musculus | 35,057 | 2-Sep-98 |
| | | | | | 3′ similar to gb: J03810 GLUCOSE TRANSPORTER TYPE 2, LIVER (HUMAN); | | | |
| | | | | | gb: X15684 Mouse mRNA for liver-type glucose transporter protein (MOUSE);, | | | |
| | | | | | mRNA sequence. | | | |
| rxa01223 | 735 | GB_PR4:AC007386 | 176742 | AC007386 | Homo sapiens BAC clone NH0359K10 from 2, complete sequence. | Homo sapiens | 39,551 | 22-OCT- |
| | | | | | | | | 1999 |
| | | GB_PR4:AC007386 | 176742 | AC007386 | Homo sapiens BAC clone NH0359K10 from 2, complete sequence. | Homo sapiens | 38,678 | 22-OCT- |
| | | | | | | | | 1999 |
| rxa01226 | 663 | GB_PR2:HS21F7 | 150789 | AL033375 | Human DNA sequence from clone 21F7 on chromosome 6q16.1-21. Contains part | Homo sapiens | 37,309 | 23-Nov-99 |
| | | | | | of an exon of a putative new gene and STSs and GSSs, complete sequence. | | | |
| | | GB_PR3:AF023268 | 75270 | AF023268 | Homo sapiens clk2 kinase (CLK2), propin1, cote1, glucocerebrosidase (GBA), and | Homo sapiens | 38,923 | 28-OCT- |
| | | | | | metaxin genes, complete cds; metaxin pseudogene and glucocerebrosidase | | | 1997 |
| | | | | | pseudogene; and thrombospondin3 (THBS3) gene, partial cds. | | | |
| | | GB_BA2:AF016485 | 191346 | AF016485 | Halobacterium sp. NRC-1 plasmid pNRC100, complete plasmid sequence. | Halobacterium sp. NRC-1 | 39,938 | 29-MAR- |
| | | | | | | | | 1999 |
| rxa01228 | 339 | GB_PR2:HS1158E12 | 163871 | AL031584 | Human DNA sequence from clone 1158E12 on chromosome Xp11.23-11.4 | Homo sapiens | 34,718 | 23-Nov-99 |
| | | | | | Contains EST, STS, GSS, CpG island, complete sequence. | | | |
| | | GB_HTG6:AC008180_0 | 110000 | AC008180 | Homo sapiens clone RP11-292L5, *** SEQUENCING IN PROGRESS ***, 152 | Homo sapiens | 31,212 | 29-Jul-99 |
| | | | | | unordered pieces. | | | |
| | | GB_PR4:AC004908 | 138251 | AC004908 | Homo sapiens PAC clone DJ0855D21, complete sequence. | Homo sapiens | 37,082 | 15-Jan-99 |
| rxa01252 | 777 | GB_BA1:MTV025 | 121125 | AL022121 | Mycobacterium tuberculosis H37Rv complete genome; segment 155/162. | Mycobacterium tuberculosis | 39,171 | 24-Jun-99 |
| | | GB_BA1:SC66T3 | 35101 | AL079348 | Streptomyces coelicolor cosmid 66T3. | Streptomyces coelicolor | 35,401 | 19-Jun-99 |
| | | GB_BA2:AF151381 | 1296 | AF151381 | Streptomyces coelicolor recombination protein RecR (recR) gene, complete cds; | Streptomyces coelicolor | 53,826 | 20-Aug-99 |
| | | | | | and unknown gene. | | | |
| rxa01264 | 339 | GB_GSS10:AQ195163 | 617 | AQ195163 | RPCI11-66I23.TJ RPCI-11 Homo sapiens genomic clone RPCI-11-66I23, genomic | Homo sapiens | 41,016 | 20-Apr-99 |
| | | | | | survey sequence. | | | |
| | | GB_HTG2:AC000016 | 194000 | AC000016 | Homo sapiens chromosome 4, *** SEQUENCING IN PROGRESS ***, 9 unordered | Homo sapiens | 38,253 | 16-MAY- |
| | | | | | pieces. | | | 1998 |
| | | GB_STS:G53604 | 617 | G53604 | SHGC-86312 Human Homo sapiens STS genomic, sequence tagged site. | Homo sapiens | 41,016 | 25-Jun-99 |
| rxa01265 | | | | | | | | |
| rxa01274 | 1218 | GB_PAT:E15823 | 2323 | E15823 | DNA encoding cell surface protein from Corynebacterium ammoniagenes. | Corynebacterium | 52,523 | 28-Jul-99 |
| | | | | | | ammoniagenes | | |
| | | GB_HTG3:AF182108 | 167065 | AF182108 | Homo sapiens chromosome 8 clone BAC R-11N9 map 8p12.8, ***SEQUENCING | Homo sapiens | 35,377 | 08-OCT- |
| | | | | | IN PROGRESS ***, in unordered pieces. | | | 1999 |
| | | GB_HTG3:AF182108 | 167065 | AF182108 | Homo sapiens chromosome 8 clone BAC R-11N9 map 8p12.8, ***SEQUENCING | Homo sapiens | 35,377 | 08-OCT- |
| | | | | | IN PROGRESS ***, in unordered pieces. | | | 1999 |
| rxa01278 | 2250 | GB_BA1:MLB1790G | 37617 | Z14314 | M. leprae genes rplL, rpoB, rpoC, end, rpsL, rpsG, efg, tuf, rpsJ, rplC for ribosomal | Mycobacterium leprae | 70,031 | 11-Feb-93 |
| | | | | | protein L7, RNA polymerase beta subunit, RNA polymerase beta′ subunit, | | | |
| | | | | | endonuclease, ribosomal protein S7, ribosomal protein S12, elongation | | | |
| | | | | | factor G, elongation factor Tu, ribosomal protein S10, ribosomal protein L3 and mkl | | | |
| | | | | | gene. | | | |
| | | GB_BA1:MTV040 | 15100 | AL021943 | Mycobacterium tuberculosis H37Rv complete genome; segment 33/162. | Mycobacterium tuberculosis | 70,704 | 17-Jun-98 |
| | | GB_BA1:ATFUSATUF | 3412 | X99673 | A. tumefaciens fusA & tufA genes. | Agrobacterium tumefaciens | 64,042 | 11-Nov-96 |
| rxa01283 | 1316 | GB_BA1:MLB1790G | 37617 | Z14314 | M. leprae genes rplL, rpoB, rpoC, end, rpsL, rpsG, efg, tuf, rpsJ, rplC for ribosomal | Mycobacterium leprae | 65,865 | 11-Feb-93 |
| | | | | | protein L7, RNA polymerase beta subunit, RNA polymerase beta′ subunit, | | | |
| | | | | | endonuclease, ribosomal protein S7, ribosomal protein S12, elongation | | | |
| | | | | | factor G, elongation factor Tu, ribosomal protein S10, ribosomal protein L3 and mkl | | | |
| | | | | | gene. | | | |
| | | GB_BA1:MTCI376 | 19770 | Z95972 | Mycobacterium tuberculosis H37Rv complete genome; segment 32/162. | Mycobacterium tuberculosis | 64,633 | 17-Jun-98 |
| | | GB_BA2:ECOUW89 | 176195 | U00006 | E. coli chromosomal region from 89.2 to 92.8 minutes. | Escherichia coli | 46,615 | 17-DEC- |
| | | | | | | | | 1993 |
| rxa01284 | 667 | GB_BA1:CGTUF | 1191 | X77034 | C. glutamicum tuf gene for elongation factor Tu. | Corynebacterium glutamicum | 100,000 | 27-OCT- |
| | | | | | | | | 1994 |
| | | GB_BA1:MTCY210 | 36804 | Z84395 | Mycobacterium tuberculosis H37Rv complete genome; segment 34/162. | Mycobacterium tuberculosis | 74,622 | 17-Jun-98 |
| | | GB_BA1:MSGY42 | 36526 | AD000005 | Mycobacterium tuberculosis sequence from clone y42. | Mycobacterium tuberculosis | 37,419 | 03-DEC- |
| | | | | | | | | 1996 |
| rxa01327 | 267 | GB_SY:SCU53587 | 4546 | U53587 | Artificial Corynebacterium glutamicum IS1207-derived transposon transposase | synthetic construct | 60,674 | 06-MAY- |
| | | | | | genes, complete cds, and 3′5″-aminoglycoside phosphotransferase (aphA-3) gene, | | | 1996 |
| | | | | | complete cds. | | | |
| | | GB_BA1:BLIS13869 | 1840 | Z66534 | B. lactofermentum IS13869 DNA and transposase gene. | Corynebacterium glutamicum | 62,172 | 16-Jul-96 |
| | | EM_PAT:E10419 | 1469 | E10419 | Insertion sequence derived from C. glutamicum. | Corynebacterium glutamicum | 60,674 | 08-OCT- |
| | | | | | | | | 1997 (Rel. |
| | | | | | | | | 52, |
| | | | | | | | | Created) |
| rxa01328 | 498 | GB_BA1:BLIS13869 | 1840 | Z66534 | B. lactofermentum IS13869 DNA and transposase gene. | Corynebacterium glutamicum | 73,038 | 16-Jul-96 |
| | | GB_SY:SCU53587 | 4546 | U53587 | Artificial Corynebacterium glutamicum IS1207-derived transposon transposase | synthetic construct | 68,813 | 06-MAY- |
| | | | | | genes, complete cds, and 3′5″-aminoglycoside phosphotransferase (aphA-3) gene, | | | 1996 |
| | | | | | complete cds. | | | |
| | | GB_PAT:I43826 | 1452 | I43826 | Sequence 1 from patent U.S. Pat. No. 5633154. | Unknown. | 69,014 | 07-OCT- |
| | | | | | | | | 1997 |
| rxa01329 | 414 | GB_BA1:BLIS13869 | 1840 | Z66534 | B. lactofermentum IS13869 DNA and transposase gene. | Corynebacterium glutamicum | 73,966 | 16-Jul-96 |
| | | GB_PAT:E12758 | 1453 | E12758 | DNA encoding Brevibacterium transposase. | Corynebacterium glutamicum | 73,020 | 24-Jun-98 |
| | | GB_PAT:I33166 | 1453 | I33166 | Sequence 1 from patent U.S. Pat. No. 5591577. | Unknown. | 73,020 | 6-Feb-97 |
| rxa01344 | 2647 | GB_BA1:MSU24494 | 3752 | U24494 | Mycobacterium smegmatis DNA polymerase (rpoB) gene, complete cds. | Mycobacterium smegmatis | 73,086 | 07-MAR- |
| | | | | | | | | 1996 |
| | | GB_BA1:MTCI376 | 19770 | Z95972 | Mycobacterium tuberculosis H37Rv complete genome; segment 32/162. | Mycobacterium tuberculosis | 71,385 | 17-Jun-98 |
| | | GB_BA1:MSGRPOB | 5084 | L27989 | Mycobacterium tuberculosis RNA polymerase beta-subunit (rpoB) gene, complete | Mycobacterium tuberculosis | 71,429 | 13-Sep-94 |
| | | | | | cds and RNA polymerase beta′-subunit rpoC gene, partial cds. | | | |
| rxa01355 | 909 | GB_HTG4:AC009135 | 168607 | AC009135 | Homo sapiens chromosome 16 clone RPCI-11_509E10, *** SEQUENCING IN | Homo sapiens | 37,156 | 31-OCT- |
| | | | | | PROGRESS ***, 231 unordered pieces. | | | 1999 |
| | | GB_HTG4:AC009135 | 168607 | AC009135 | Homo sapiens chromosome 16 clone RPCI-11_509E10, *** SEQUENCING IN | Homo sapiens | 37,156 | 31-OCT- |
| | | | | | PROGRESS ***, 231 unordered pieces. | | | 1999 |
| | | GB_BA1:PFLEPALEP | 1391 | X56466 | P. fluorescens lepA (partial) and lep gene for leader peptidase 1. | Pseudomonas fluorescens | 44,023 | 5-Feb-92 |
| rxa01387 | 469 | GB_BA1:MLB1790G | 37617 | Z14314 | M. leprae genes rplL, rpoB, rpoC, end, rpsL, rpsG, efg, tuf, rpsJ, rplC for ribosomal | Mycobacterium leprae | 71,429 | 11-Feb-93 |
| | | | | | protein L7, RNA polymerase beta subunit, RNA polymerase beta′ subunit, | | | |
| | | | | | endonuclease, ribosomal protein S7, ribosomal protein S12, elongation | | | |
| | | | | | factor G, elongation factor Tu, ribosomal protein S10, ribosomal protein L3 and mkl | | | |
| | | | | | gene. | | | |
| | | GB_BA1:MTCI376 | 19770 | Z95972 | Mycobacterium tuberculosis H37Rv complete genome; segment 32/162. | Mycobacterium tuberculosis | 73,176 | 17-Jun-98 |
| | | GB_BA1:BSUB0001 | 213080 | Z99104 | Bacillus subtilis complete genome (section 1 of 21): from 1 to 213080. | Bacillus subtilis | 63,853 | 26-Nov-97 |
| rxa01388 | 255 | GB_HTG2:HS676J13 | 117045 | AL034347 | Homo sapiens chromosome 6 clone RP4-676J13 map q14, *** SEQUENCING IN | Homo sapiens | 36,863 | 03-DEC- |
| | | | | | PROGRESS ***, in unordered pieces. | | | 1999 |
| | | GB_HTG2:HS676J13 | 117045 | AL034347 | Homo sapiens chromosome 6 clone RP4-676J13 map q14, *** SEQUENCING IN | Homo sapiens | 36,863 | 03-DEC- |
| | | | | | PROGRESS ***, in unordered pieces. | | | 1999 |
| | | GB_HTG2:HS676J13 | 117045 | AL034347 | Homo sapiens chromosome 6 clone RP4-676J13 map q14, *** SEQUENCING IN | Homo sapiens | 29,804 | 03-DEC- |
| | | | | | PROGRESS ***, in unordered pieces. | | | 1999 |
| rxa01398 | 659 | GB_BA1:MTV012 | 70287 | AL021287 | Mycobacterium tuberculosis H37Rv complete genome; segment 132/162. | Mycobacterium tuberculosis | 36,547 | 23-Jun-99 |
| | | GB_BA1:S70345 | 5077 | S70345 | SpaA = endocarditis immunodominant antigen [Streptococcus sobrinus, MUCOB | Streptococcus sobrinus | 35,139 | 23-Sep-94 |
| | | | | | 263, Genomic, 5077 nt]. | | | |
| | | GB_BA1:STRPAGA | 5100 | D90354 | S. sobrinus pag gene for surface protein antigen (PAg). | Streptococcus sobrinus | 35,604 | 7-Feb-99 |
| rxa01431 | 444 | GB_BA2:AE001648 | 13965 | AE001648 | Chlamydia pneumoniae section 64 of 103 of the complete genome. | Chlamydophila pneumoniae | 44,218 | 08-MAR- |
| | | | | | | | | 1999 |
| | | GB_BA2:AE001648 | 13965 | AE001648 | Chlamydia pneumoniae section 64 of 103 of the complete genome. | Chlamydophila pneumoniae | 35,520 | 08-MAR- |
| | | | | | | | | 1999 |
| rxa01432 | 1074 | GB_BA1:MSGY367 | 35336 | AD000008 | Mycobacterium tuberculosis sequence from clone y367. | Mycobacterium tuberculosis | 37,869 | 03-DEC- |
| | | | | | | | | 1996 |
| | | GB_BA1:MTV028 | 11381 | AL021426 | Mycobacterium tuberculosis H37Rv complete genome; segment 162/162. | Mycobacterium tuberculosis | 61,891 | 17-Jun-98 |
| | | GB_BA2:AF023161 | 1775 | AF023161 | Mycobacterium smegmatis thioredoxin reductase (trxB) and thioredoxin (trxA) | Mycobacterium smegmatis | 64,105 | 13-OCT- |
| | | | | | genes, complete cds. | | | 1997 |
| rxa01433 | 726 | GB_BA2:AF105341 | 3010 | AF105341 | Listeria monocytogenes threonine dehydratase (thd1) gene, partial cds; alpha | Listeria monocytogenes | 36,254 | 04-MAR- |
| | | | | | acetolactate decarboxylase gene, complete cds; and pyrimidine nucleoside | | | 1999 |
| | | | | | phosphorylase (pdp1) gene, partial cds. | | | |
| | | GB_BA2:AF105341 | 3010 | AF105341 | Listeria monocytogenes threonine dehydratase (thd1) gene, partial cds; alpha | Listeria monocytogenes | 35,303 | 04-MAR- |
| | | | | | acetolactate decarboxylase gene, complete cds; and pyrimidine nucleoside | | | 1999 |
| | | | | | phosphorylase (pdp1) gene, partial cds. | | | |
| rxa01443 | 954 | GB_BA1:CGISABL | 1290 | X69104 | C. glutamicum IS3 related insertion element. | Corynebacterium glutamicum | 72,823 | 9-Aug-95 |
| | | GB_PAT:I33168 | 1279 | I33168 | Sequence 4 from patent U.S. Pat. No. 5591577. | Unknown. | 72,293 | 6-Feb-97 |
| | | GB_PAT:E12760 | 1279 | E12760 | DNA encoding Brevibacterium transposase. | Corynebacterium glutamicum | 72,293 | 24-Jun-98 |
| rxa01444 | 390 | GB_BA1:CGISABL | 1290 | X69104 | C. glutamicum IS3 related insertion element. | Corynebacterium glutamicum | 69,034 | 9-Aug-95 |
| | | GB_PAT:E12760 | 1279 | E12760 | DNA encoding Brevibacterium transposase. | Corynebacterium glutamicum | 69,318 | 24-Jun-98 |
| | | GB_PAT:I33168 | 1279 | I33168 | Sequence 4 from patent U.S. Pat. No. 5591577. | Unknown. | 69,318 | 6-Feb-97 |
| rxa01449 | 1141 | GB_HTG1:CEY1A5 | 196643 | AL008872 | Caenorhabditis elegans chromosome III clone Y1A5, *** SEQUENCING IN | Caenorhabditis elegans | 36,208 | 9-Nov-97 |
| | | | | | PROGRESS ***, in unordered pieces. | | | |
| | | GB_HTG1:CEY1A5 | 196643 | AL008872 | Caenorhabditis elegans chromosome III clone Y1A5, *** SEQUENCING IN | Caenorhabditis elegans | 36,208 | 9-Nov-97 |
| | | | | | PROGRESS ***, in unordered pieces. | | | |
| | | GB_IN1:PFMAL3P4 | 113899 | AL008970 | Plasmodium falciparum MAL3P4, complete sequence. | Plasmodium falciparum | 33,333 | 28-Jul-99 |
| rxa01490 | 1014 | GB_BA1:MTV002 | 56414 | AL008967 | Mycobacterium tuberculosis H37Rv complete genome; segment 122/162. | Mycobacterium tuberculosis | 36,436 | 17-Jun-98 |
| | | GB_BA1:SC9F2 | 11908 | AL035559 | Streptomyces coelicolor cosmid 9F2. | Streptomyces coelicolor | 36,774 | 25-Feb-99 |
| | | GB_BA1:SPSNBCGEN | 22449 | X98690 | S. pristinaespiralis snbC and snbDE genes. | Streptomyces pristinaespiralis | 41,509 | 24-MAR- |
| | | | | | | | | 1997 |
| rxa01493 | 1434 | GB_HTG3:AC009583 | 172341 | AC009583 | Homo sapiens chromosome 4 clone 158_C_21 map 4, *** SEQUENCING IN | Homo sapiens | 34,102 | 29-Sep-99 |
| | | | | | PROGRESS ***, 17 unordered pieces. | | | |
| | | GB_HTG3:AC009583 | 172341 | AC009583 | Homo sapiens chromosome 4 clone 158_C_21 map 4, *** SEQUENCING IN | Homo sapiens | 34,102 | 29-Sep-99 |
| | | | | | PROGRESS ***, 17 unordered pieces. | | | |
| | | GB_HTG3:AC009583 | 172341 | AC009583 | Homo sapiens chromosome 4 clone 158_C_21 map 4, *** SEQUENCING IN | Homo sapiens | 35,133 | 29-Sep-99 |
| | | | | | PROGRESS ***, 17 unordered pieces. | | | |
| rxa01496 | 3135 | GB_BA1:MTCY16B7 | 43430 | Z81331 | Mycobacterium tuberculosis H37Rv complete genome; segment 123/162. | Mycobacterium tuberculosis | 39,391 | 17-Jun-98 |
| | | GB_BA1:MSGY414A | 40121 | AD000007 | Mycobacterium tuberculosis sequence from clone y414a. | Mycobacterium tuberculosis | 60,308 | 03-DEC- |
| | | | | | | | | 1996 |
| | | GB_BA1:MLCB596 | 38426 | AL035472 | Mycobacterium leprae cosmid B596. | Mycobacterium leprae | 57,989 | 27-Aug-99 |
| rxa01522 | 1701 | GB_BA2:RHMGLTX | 4119 | M27221 | Sinorhizobium meliloti glutamyl-tRNA synthetase (gltX) and lysyl-tRNA synthetase | Sinorhizobium meliloti | 49,669 | 11-Sep-98 |
| | | | | | (lysS) genes, complete cds. | | | |
| | | GB_BA1:MTCY06H11 | 38000 | Z85982 | Mycobacterium tuberculosis H37Rv complete genome; segment 73/162. | Mycobacterium tuberculosis | 38,152 | 17-Jun-98 |
| | | GB_EST8:AA002902 | 396 | AA002902 | mg38a12.r1 Soares mouse embryo NbME13.5 14.5 Mus musculus cDNA clone | Mus musculus | 42,333 | 19-Jul-96 |
| | | | | | IMAGE: 426046 5′, mRNA sequence. | | | |
| rxa01556 | 872 | GB_PR2:HSU73633 | 42845 | U73633 | Human chromosome 11 146h12 cosmid, complete sequence. | Homo sapiens | 37,412 | 19-Jun-97 |
| | | GB_RO:MMU70209 | 14141 | U70209 | Mus musculus polycystic kidney disease 1 protein (Pkd1) mRNA, complete cds. | Mus musculus | 42,536 | 31-MAY- |
| | | | | | | | | 1997 |
| | | GB_HTG2:AC007903 | 170591 | AC007903 | Homo sapiens chromosome 18 clone 563_I_8 map 18, *** SEQUENCING IN | Homo sapiens | 34,868 | 23-Jun-99 |
| | | | | | PROGRESS ***, 6 unordered pieces. | | | |
| rxa01558 | 1332 | GB_BA1:MTCY227 | 35946 | Z77724 | Mycobacterium tuberculosis H37Rv complete genome; segment 114/162. | Mycobacterium tuberculosis | 38,567 | 17-Jun-98 |
| | | GB_BA1:MLCB1259 | 38807 | AL023591 | Mycobacterium leprae cosmid B1259. | Mycobacterium leprae | 53,364 | 27-Aug-99 |
| | | GB_BA1:U00011 | 40429 | U00011 | Mycobacterium leprae cosmid B1177. | Mycobacterium leprae | 38,498 | 01-MAR- |
| | | | | | | | | 1994 |
| rxa01559 | 1965 | GB_BA1:MTCY227 | 35946 | Z77724 | Mycobacterium tuberculosis H37Rv complete genome; segment 114/162. | Mycobacterium tuberculosis | 37,945 | 17-Jun-98 |
| | | GB_BA1:MLCB1259 | 38807 | AL023591 | Mycobacterium leprae cosmid B1259. | Mycobacterium leprae | 51,117 | 27-Aug-99 |
| | | GB_BA1:U00011 | 40429 | U00011 | Mycobacterium leprae cosmid B1177. | Mycobacterium leprae | 37,513 | 01-MAR- |
| | | | | | | | | 1994 |
| rxa01582 | 1212 | GB_BA1:MTCY06H11 | 38000 | Z85982 | Mycobacterium tuberculosis H37Rv complete genome; segment 73/162. | Mycobacterium tuberculosis | 60,249 | 17-Jun-98 |
| | | GB_BA1:MSGB1133CS | 42106 | L78811 | Mycobacterium leprae cosmid B1133 DNA sequence. | Mycobacterium leprae | 58,547 | 15-Jun-96 |
| | | GB_BA1:SCI35 | 40909 | AL031541 | Streptomyces coelicolor cosmid I35. | Streptomyces coelicolor | 37,479 | 9-Sep-98 |
| rxa01583 | 2466 | GB_BA1:MTV004 | 69350 | AL009198 | Mycobacterium tuberculosis H37Rv complete genome; segment 144/162. | Mycobacterium tuberculosis | 39,373 | 18-Jun-98 |
| | | GB_GSS8:AQ077749 | 538 | AQ077749 | CIT-HSP-2367E24.TR CIT-HSP Homo sapiens genomic clone 2367E24, genomic | Homo sapiens | 36,989 | 20-Aug-98 |
| | | | | | survey sequence. | | | |
| | | GB_BA1:MTV004 | 69350 | AL009198 | Mycobacterium tuberculosis H37Rv complete genome; segment 144/162. | Mycobacterium tuberculosis | 39,220 | 18-Jun-98 |
| rxa01596 | 1902 | GB_BA1:SCI51 | 40745 | AL109848 | Streptomyces coelicolor cosmid I51. | Streptomyces coelicolor A3(2) | 38,388 | 16-Aug-99 |
| | | GB_BA1:MTCI125 | 37432 | Z98268 | Mycobacterium tuberculosis H37Rv complete genome; segment 76/162. | Mycobacterium tuberculosis | 53,052 | 17-Jun-98 |
| | | GB_BA1:MTHYPROT | 2544 | X98295 | M. tuberculosis TlyA gene. | Mycobacterium tuberculosis | 49,393 | 2-Jun-98 |
| rxa01601 | 1035 | GB_BA1:MTCI125 | 37432 | Z98268 | Mycobacterium tuberculosis H37Rv complete genome; segment 76/162. | Mycobacterium tuberculosis | 54,801 | 17-Jun-98 |
| | | GB_BA1:MLCB1351 | 38936 | Z95117 | Mycobacterium leprae cosmid B1351. | Mycobacterium leprae | 39,577 | 24-Jun-97 |
| | | GB_BA1:U00021 | 39193 | U00021 | Mycobacterium leprae cosmid L247. | Mycobacterium leprae | 39,476 | 29-Sep-94 |
| rxa01613 | 1338 | GB_BA1:MTCY24A1 | 20270 | Z95207 | Mycobacterium tuberculosis H37Rv complete genome; segment 124/162. | Mycobacterium tuberculosis | 52,216 | 17-Jun-98 |
| | | GB_BA1:AF002193 | 1812 | AF002193 | Mycobacterium tuberculosis glutathione reductase homolog (gorA) gene, complete | Mycobacterium tuberculosis | 52,216 | 18-Jul-97 |
| | | | | | cds. | | | |
| | | GB_HTG3:AC008675 | 206439 | AC008675 | Homo sapiens chromosome 5 clone CIT978SKB_45I8, SEQUENCING IN | Homo sapiens | 36,145 | 3-Aug-99 |
| | | | | | PROGRESS ***, 43 unordered pieces. | | | |
| rxa01621 | 1563 | GB_BA1:MTY15F10 | 38204 | Z94121 | Mycobacterium tuberculosis H37Rv complete genome; segment 161/162. | Mycobacterium tuberculosis | 36,776 | 17-Jun-98 |
| | | GB_BA1:MSGY367 | 35336 | AD000008 | Mycobacterium tuberculosis sequence from clone y367. | Mycobacterium tuberculosis | 60,525 | 03-DEC- |
| | | | | | | | | 1996 |
| | | GB_BA1:MTY15F10 | 38204 | Z94121 | Mycobacterium tuberculosis H37Rv complete genome; segment 161/162. | Mycobacterium tuberculosis | 36,288 | 17-Jun-98 |
| rxa01648 | 492 | GB_BA1:CGISABL | 1290 | X69104 | C. glutamicum IS3 related insertion element. | Corynebacterium glutamicum | 76,483 | 9-Aug-95 |
| | | GB_PAT:AR038104 | 1279 | AR038104 | Sequence 9 from patent U.S. Pat. No. 5804414. | Unknown. | 75,574 | 29-Sep-99 |
| | | GB_PAT:E12760 | 1279 | E12760 | DNA encoding Brevibacterium transposase. | Corynebacterium glutamicum | 75,574 | 24-Jun-98 |
| rxa01649 | 543 | GB_BA1:CGISABL | 1290 | X69104 | C. glutamicum IS3 related insertion element. | Corynebacterium glutamicum | 67,978 | 9-Aug-95 |
| | | GB_PAT:AR038104 | 1279 | AR038104 | Sequence 9 from patent U.S. Pat. No. 5804414. | Unknown. | 67,857 | 29-Sep-99 |
| | | GB_PAT:E12760 | 1279 | E12760 | DNA encoding Brevibacterium transposase. | Corynebacterium glutamicum | 67,857 | 24-Jun-98 |
| rxa01650 | 237 | GB_PL2:SPAC17A2 | 36642 | Z99292 | S. pombe chromosome I cosmid c17A2. | Schizosaccharomyces pombe | 42,241 | 22-Jul-99 |
| | | GB_PL2:SPAC17A2 | 36642 | Z99292 | S. pombe chromosome I cosmid c17A2. | Schizosaccharomyces pombe | 33,766 | 22-Jul-99 |
| | | GB_PL1:SCYDR012W | 2732 | Z74308 | S. cerevisiae chromosome IV reading frame ORF YDR012w. | Saccharomyces cerevisiae | 30,804 | 12-Aug-98 |
| rxa01651 | 258 | GB_BA1:CGISABL | 1290 | X69104 | C. glutamicum IS3 related insertion element. | Corynebacterium glutamicum | 69,643 | 9-Aug-95 |
| | | GB_PAT:AR038104 | 1279 | AR038104 | Sequence 9 from patent U.S. Pat. No. 5804414. | Unknown. | 67,265 | 29-Sep-99 |
| | | GB_PAT:I33168 | 1279 | I33168 | Sequence 4 from patent U.S. Pat. No. 5591577. | Unknown. | 67,265 | 6-Feb-97 |
| rxa01670 | 930 | GB_BA2:SMU56906 | 3303 | U56906 | Serratia marcescens DNA gyrase (gyrA) gene, complete cds. | Serratia marcescens | 36,186 | 7-Jan-98 |
| | | GB_BA1:D90902 | 122056 | D90902 | Synechocystis sp. PCC6803 complete genome, 4/27, 402290-524345. | Synechocystis sp. | 37,814 | 7-Feb-99 |
| | | GB_HTG2:HSDJ816K9 | 144277 | AL117349 | Homo sapiens chromosome 1 clone RP4-816K9, *** SEQUENCING IN | Homo sapiens | 41,759 | 30-Nov-99 |
| | | | | | PROGRESS ***, in unordered pieces. | | | |
| rxa01680 | | | | | | | | |
| rxa01704 | 1100 | GB_HTG2:AF129075 | 195012 | AF129075 | Homo sapiens chromosome 21 clone J12100; E0479 map 21q22.1, | Homo sapiens | 40,187 | 03-MAR- |
| | | | | | ***SEQUENCING IN PROGRESS ***, in ordered pieces. | | | 1999 |
| | | GB_HTG2:AF129075 | 195012 | AF129075 | Homo sapiens chromosome 21 clone J12100; E0479 map 21q22.1, | Homo sapiens | 40,187 | 03-MAR- |
| | | | | | ***SEQUENCING IN PROGRESS ***, in ordered pieces. | | | 1999 |
| | | GB_HTG2:AC007271 | 184269 | AC007271 | Homo sapiens clone NH0004B12, *** SEQUENCING IN PROGRESS ***, 2 | Homo sapiens | 38,667 | 16-Apr-99 |
| | | | | | unordered pieces. | | | |
| rxa01710 | 531 | GB_BA1:MTCY441 | 35187 | Z80225 | Mycobacterium tuberculosis H37Rv complete genome; segment 118/162. | Mycobacterium tuberculosis | 56,309 | 18-Jun-98 |
| | | GB_EST16:AA540562 | 695 | AA540562 | LD20282.5prime LD Drosophila melanogaster embryo BlueScript Drosophila | Drosophila melanogaster | 51,357 | 28-Nov-98 |
| | | | | | melanogaster cDNA clone LD20282 5prime, mRNA sequence. | | | |
| | | GB_EST37:AI944677 | 580 | AI944677 | bs04b04.y1 Drosophila melanogaster adult testis library Drosophila melanogaster | Drosophila melanogaster | 50,728 | 17-Aug-99 |
| | | | | | cDNA clone bs04b04 5′, mRNA sequence. | | | |
| rxa01724 | 1343 | GB_BA1:MLU15186 | 36241 | U15186 | Mycobacterium leprae cosmid L471. | Mycobacterium leprae | 37,412 | 09-MAR- |
| | | | | | | | | 1995 |
| | | GB_BA1:MTCY373 | 35516 | Z73419 | Mycobacterium tuberculosis H37Rv complete genome; segment 57/162. | Mycobacterium tuberculosis | 47,819 | 17-Jun-98 |
| | | GB_HTG2:AC007608 | 170057 | AC007608 | Homo sapiens chromosome 16 clone 401P9, *** SEQUENCING IN | Homo sapiens | 37,236 | 20-MAY- |
| | | | | | PROGRESS***, 59 unordered pieces. | | | 1999 |
| rxa01725 | 330 | GB_BA1:MTCY373 | 35516 | Z73419 | Mycobacterium tuberculosis H37Rv complete genome; segment 57/162. | Mycobacterium tuberculosis | 75,610 | 17-Jun-98 |
| | | GB_BA1:MLU15186 | 36241 | U15186 | Mycobacterium leprae cosmid L471. | Mycobacterium leprae | 39,355 | 09-MAR- |
| | | | | | | | | 1995 |
| | | GB_BA1:PSERHO | 1479 | L27278 | Pseudomonas fluorescens rho gene, complete cds. | Pseudomonas fluorescens | 63,303 | 9-Jan-95 |
| rxa01726 | 696 | GB_BA1:MTCY373 | 35516 | Z73419 | Mycobacterium tuberculosis H37Rv complete genome; segment 57/162. | Mycobacterium tuberculosis | 72,899 | 17-Jun-98 |
| | | GB_BA1:MLU15186 | 36241 | U15186 | Mycobacterium leprae cosmid L471. | Mycobacterium leprae | 37,500 | 09-MAR- |
| | | | | | | | | 1995 |
| | | GB_BA1:SLRHOGENE | 2986 | X95444 | S. lividans Rho gene. | Streptomyces lividans | 69,065 | 1-Feb-96 |
| rxa01730 | 1804 | GB_BA1:MTCY227 | 35946 | Z77724 | Mycobacterium tuberculosis H37Rv complete genome; segment 114/162. | Mycobacterium tuberculosis | 39,943 | 17-Jun-98 |
| | | GB_BA1:MLCB1259 | 38807 | AL023591 | Mycobacterium leprae cosmid B1259. | Mycobacterium leprae | 65,120 | 27-Aug-99 |
| | | GB_BA2:S82268 | 2209 | S82268 | Mycobacterium leprae ASPS and antigen T5 genes, complete cds. | Mycobacterium leprae | 40,715 | 22-Jul-98 |
| rxa01733 | 1274 | GB_BA1:MSORIREP | 10430 | X92503 | M. smegmatis origin of replication and genes rpmH, dnaA, dnaN, gnd, recF, gyrB, | Mycobacterium smegmatis | 52,740 | 26-Aug-97 |
| | | | | | gyrA. | | | |
| | | GB_BA1:MSGYRBA | 6000 | X94224 | M. smegmatis gyrB and gyrA genes. | Mycobacterium smegmatis | 52,277 | 12-Feb-97 |
| | | GB_HTG4:AC010890 | 175554 | AC010890 | Homo sapiens chromosome unknown clone NH0449L24, WORKING DRAFT | Homo sapiens | 36,601 | 29-OCT- |
| | | | | | SEQUENCE, in unordered pieces. | | | 1999 |
| rxa01736 | 2891 | GB_BA1:MTV014 | 58280 | AL021646 | Mycobacterium tuberculosis H37Rv complete genome; segment 137/162. | Mycobacterium tuberculosis | 38,918 | 18-Jun-98 |
| | | GB_PL2:AF156928 | 2290 | AF156928 | Candida albicans folylpolyglutamate synthetase (fpgs) gene, complete cds. | Candida albicans | 34,894 | 22-Jun-99 |
| | | GB_GSS12:AQ421204 | 483 | AQ421204 | RPCI-11-167B4.TJ RPCI-11 Homo sapiens genomic clone RPCI-11-167B4, | Homo sapiens | 39,085 | 23-MAR- |
| | | | | | genomic survey sequence. | | | 1999 |
| rxa01737 | 1182 | GB_BA1:SCGD3 | 33779 | AL096822 | Streptomyces coelicolor cosmid GD3. | Streptomyces coelicolor | 38,054 | 8-Jul-99 |
| | | GB_HTG1:CNS01DSB | 222193 | AL121768 | Homo sapiens chromosome 14 clone R-976B16, *** SEQUENCING IN | Homo sapiens | 35,147 | 05-OCT- |
| | | | | | PROGRESS ***, in ordered pieces. | | | 1999 |
| | | GB_HTG1:CNS01DSB | 222193 | AL121768 | Homo sapiens chromosome 14 clone R-976B16, *** SEQUENCING IN | Homo sapiens | 35,147 | 05-OCT- |
| | | | | | PROGRESS ***, in ordered pieces. | | | 1999 |
| rxa01784 | 705 | GB_BA2:AF121000 | 19751 | AF121000 | Corynebacterium glutamicum strain 22243 R-plasmid pAG1, complete sequence. | Corynebacterium glutamicum | 36,270 | 14-Apr-99 |
| | | GB_BA1:FVBPOAD2A | 45519 | D26094 | Flavobacterium sp. plasmid pOAD2 DNA, whole sequence. | Flavobacterium sp. | 38,450 | 6-Feb-99 |
| | | GB_BA1:FVBPOAD2A | 45519 | D26094 | Flavobacterium sp. plasmid pOAD2 DNA, whole sequence. | Flavobacterium sp. | 59,052 | 6-Feb-99 |
| rxa01798 | 373 | GB_IN1:AB018440 | 13738 | AB018440 | Echinococcus multilocularis mitochondrial DNA, complete genome. | Mitochondrion Echinococcus | 34,877 | 28-OCT- |
| | | GB_BA1:SSU82227 | 8313 | U82227 | Sulfolobus solfataricus leucyl-tRNA synthetase (leuS) gene, partial cds, histidine | Sulfolobus solfataricus | 40,166 | 14-Jul-97 |
| | | | | | biosynthesis operon hisCGABdFDEHI, (hisC, hisG, hisBd, hisF, hisD, hisE, hisH | | | |
| | | | | | and hisI) genes, complete cds and seryl-tRNA synthetase (serS) gene, partial cds. | | | |
| | | GB_BA1:SSU82227 | 8313 | U82227 | Sulfolobus solfataricus leucyl-tRNA synthetase (leuS) gene, partial cds, histidine | Sulfolobus solfataricus | 33,989 | 14-Jul-97 |
| | | | | | biosynthesis operon hisCGABdFDEHI, (hisC, hisG, hisBd, hisF, hisD, hisE, hisH | | | |
| | | | | | and hisI) genes, complete cds and seryl-tRNA synthetase (serS) gene, partial cds. | | | |
| rxa01818 | 1110 | GB_IN1:CEF08G5 | 32784 | Z70682 | Caenorhabditis elegans cosmid F08G5, complete sequence. | Caenorhabditis elegans | 35,032 | 23-Jul-99 |
| | | GB_HTG2:AC008029 | 123186 | AC008029 | Drosophila melanogaster chromosome 3 clone BACR01C11 (D819) RPCI-98 | Drosophila melanogaster | 35,197 | 2-Aug-99 |
| | | | | | 01.C.11 map 84D-84D strain y; cn bw sp, *** SEQUENCING IN PROGRESS***, 92 | | | |
| | | | | | unordered pieces. | | | |
| | | GB_HTG2:AC008029 | 123186 | AC008029 | Drosophila melanogaster chromosome 3 clone BACR01C11 (D819) RPCI-98 | Drosophila melanogaster | 35,197 | 2-Aug-99 |
| | | | | | 01.C.11 map 84D-84D strain y; cn bw sp, *** SEQUENCING IN PROGRESS***, 92 | | | |
| | | | | | unordered pieces. | | | |
| rxa01819 | 570 | GB_BA1:AB023076 | 4953 | AB023076 | Pseudomonas syringae DNA, the left outside of the hrpL homology region, | Pseudomonas syringae | 36,852 | 26-Feb-99 |
| | | | | | strain: KW11. | | | |
| | | GB_BA1:AB023076 | 4953 | AB023076 | Pseudomonas syringae DNA, the left outside of the hrpL homology region, | Pseudomonas syringae | 39,646 | 26-Feb-99 |
| | | | | | strain: KW11. | | | |
| rxa01837 | 900 | GB_BA1:MTCY227 | 35946 | Z77724 | Mycobacterium tuberculosis H37Rv complete genome; segment 114/162. | Mycobacterium tuberculosis | 53,182 | 17-Jun-98 |
| | | GB_HTG2:AC006779 | 119562 | AC006779 | Caenorhabditis elegans clone Y47D7, *** SEQUENCING IN PROGRESS ***, 32 | Caenorhabditis elegans | 34,783 | 25-Feb-99 |
| | | | | | unordered pieces. | | | |
| | | GB_HTG2:AC006779 | 119562 | AC006779 | Caenorhabditis elegans clone Y47D7, *** SEQUENCING IN PROGRESS ***, 32 | Caenorhabditis elegans | 34,783 | 25-Feb-99 |
| | | | | | unordered pieces. | | | |
| rxa01841 | 486 | GB_BA2:AF139249 | 1383 | AF139249 | Actinobacillus actinomycetemcomitans rough colony protein A (rcpA) gene, | Actinobacillus | 37,395 | 25-MAY- |
| | | | | | complete cds. | actinomycetemcomitans | | 1999 |
| | | GB_EST17:C76899 | 603 | C76899 | C76899 Mouse 3.5-dpc blastocyst cDNA Mus musculus cDNA clone J0022E02 3′ | Mus musculus | 44,828 | 25-Jun-98 |
| | | | | | similar to M. musculus DNA for LINE-1 or L1 element, mRNA sequence. | | | |
| | | GB_PR3:U94190 | 6469 | U94190 | Homo sapiens Duo mRNA, complete cds. | Homo sapiens | 38,382 | 04-MAY- |
| | | | | | | | | 1998 |
| rxa01852 | 1410 | GB_BA1:MTCY227 | 35946 | Z77724 | Mycobacterium tuberculosis H37Rv complete genome; segment 114/162. | Mycobacterium tuberculosis | 38,378 | 17-Jun-98 |
| | | GB_BA1:MLCB1259 | 38807 | AL023591 | Mycobacterium leprae cosmid B1259. | Mycobacterium leprae | 59,574 | 27-Aug-99 |
| | | GB_BA1:U00011 | 40429 | U00011 | Mycobacterium leprae cosmid B1177. | Mycobacterium leprae | 37,690 | 01-MAR- |
| | | | | | | | | 1994 |
| rxa01862 | 1329 | GB_BA1:RLDCTA | 5820 | Z11529 | R. leguminosarum dctA gene encoding C4-dicarboxylate permease. | Rhizobium leguminosarum | 39,401 | 23-Sep-92 |
| | | GB_BA1:RLDCTBD | 3360 | X06253 | Rhizobium leguminosarum dctB and dctD genes involved in C4-dicarboxylate | Rhizobium leguminosarum | 39,401 | 12-Sep-93 |
| | | | | | transport. | | | |
| | | GB_BA1:RLDCTA | 5820 | Z11529 | R. leguminosarum dctA gene encoding C4-dicarboxylate permease. | Rhizobium leguminosarum | 39,269 | 23-Sep-92 |
| rxa01863 | 1219 | GB_BA1:BSUB0005 | 208430 | Z99108 | Bacillus subtilis complete genome (section 5 of 21): from 802821 to 1011250. | Bacillus subtilis | 35,673 | 26-Nov-97 |
| | | GB_BA1:D83967 | 22197 | D83967 | Bacillus subtilis genomic DNA, 74 degree region. | Bacillus subtilis | 57,261 | 20-Nov-97 |
| | | GB_BA1:STAATTB | 300 | M20393 | S. aureus bacteriophage phi-11 attachment site (attB). | Staphylococcus aureus | 99,595 | 26-Apr-93 |
| rxa01872 | 928 | GB_GSS15:AQ651661 | 422 | AQ651661 | Sheared DNA-5N18.TR Sheared DNA Trypanosoma brucei genomic clone | Trypanosoma brucei | 42,034 | 22-Jun-99 |
| | | | | | Sheared DNA-5N18, genomic survey sequence. | | | |
| | | GB_GSS15:AQ639444 | 175 | AQ639444 | 927P1-17G6.TV 927P1 Trypanosoma brucei genomic clone 927P1-17G6, genomic | Trypanosoma brucei | 51,786 | 8-Jul-99 |
| | | | | | survey sequence. | | | |
| | | GB_HTG3:AC009919 | 134724 | AC009919 | Homo sapiens clone 115_I_23, LOW-PASS SEQUENCE SAMPLING. | Homo sapiens | 37,222 | 8-Sep-99 |
| rxa01878 | 1002 | GB_HTG1:CEY64F11 | 177748 | Z99776 | Caenorhabditis elegans chromosome IV clone Y64F11, *** SEQUENCING IN | Caenorhabditis elegans | 37,564 | 14-OCT- |
| | | | | | PROGRESS ***, in unordered pieces. | | | 1998 |
| | | GB_HTG1:CEY64F11 | 177748 | Z99776 | Caenorhabditis elegans chromosome IV clone Y64F11, *** SEQUENCING IN | Caenorhabditis elegans | 37,564 | 14-OCT- |
| | | | | | PROGRESS ***, in unordered pieces. | | | 1998 |
| | | GB_HTG1:CEY64F11 | 177748 | Z99776 | Caenorhabditis elegans chromosome IV clone Y64F11, *** SEQUENCING IN | Caenorhabditis elegans | 37,576 | 14-OCT- |
| | | | | | PROGRESS ***, in unordered pieces. | | | 1998 |
| rxa01913 | 948 | GB_BA1:MTCY274 | 39991 | Z74024 | Mycobacterium tuberculosis H37Rv complete genome; segment 126/162. | Mycobacterium tuberculosis | 39,631 | 19-Jun-98 |
| | | GB_BA1:SC2E1 | 38962 | AL023797 | Streptomyces coelicolor cosmid 2E1. | Streptomyces coelicolor | 58,226 | 4-Jun-98 |
| | | GB_BA2:AF130345 | 965 | AF130345 | Streptomyces ramocissimus elongation factor Ts (tsf) gene, complete cds. | Streptomyces ramocissimus | 58,009 | 15-OCT- |
| | | | | | | | | 1999 |
| rxa01938 | 1551 | GB_BA1:MTCY24A1 | 20270 | Z95207 | Mycobacterium tuberculosis H37Rv complete genome; segment 124/162. | Mycobacterium tuberculosis | 38,976 | 17-Jun-98 |
| | | GB_GSS1:CNS00WZY | 720 | AL094252 | Arabidopsis thaliana genome survey sequence SP6 end of BAC T12O8 of TAMU | Arabidopsis thaliana | 54,028 | 28-Jun-99 |
| | | | | | library from strain Columbia of Arabidopsis thaliana, genomic survey sequence. | | | |
| | | GB_PR2:AP000056 | 100000 | AP000056 | Homo sapiens genomic DNA, chromosome 21q22.1, segment 27/28, complete | Homo sapiens | 36,967 | 20-Nov-99 |
| | | | | | sequence. | | | |
| rxa01953 | 504 | GB_BA1:MSGTNP | 2276 | M76495 | Mycobacterium smegmatis insertion element tnpR and tnpA genes, complete cds. | Mycobacterium smegmatis | 38,153 | 26-Apr-96 |
| | | GB_BA2:E12PHEAB | 6164 | M57500 | Plasmid pEST1226 putative transposase (tnpA), catechol 1,2-dioxygenase (pheB), | Plasmid pEST1226 | 56,338 | 21-OCT- |
| | | | | | phenol monooxygenase (pheA), and putative transposase (tnpA) genes, complete | | | 1998 |
| | | | | | cds. | | | |
| | | GB_PR2:HS179N16 | 172048 | Z95152 | Homo sapiens DNA sequence from PAC 179N16 on chromosome 6p21.1-21.33. | Homo sapiens | 34,490 | 23-Nov-99 |
| | | | | | Contains the SAPK4 (MAPK p38delta) gene, and the alternatively spliced SAPK2 | | | |
| | | | | | gene coding for CSaids binding protein CSBP2 and a MAPK p38beta LIKE protein. | | | |
| | | | | | Contains ESTs, STSs and two predicted CpG islands, complete sequence. | | | |
| rxa01954 | 963 | GB_BA1:SC4H8 | 15560 | AL020958 | Streptomyces coelicolor cosmid 4H8. | Streptomyces coelicolor | 37,960 | 10-DEC- |
| | | | | | | | | 1997 |
| | | GB_GSS3:B91274 | 183 | B91274 | CIT-HSP-2168G14.TF CIT-HSP Homo sapiens genomic clone 2168G14, genomic | Homo sapiens | 36,066 | 25-Jun-98 |
| | | | | | survey sequence. | | | |
| | | GB_BA1:SC4H8 | 15560 | AL020958 | Streptomyces coelicolor cosmid 4H8. | Streptomyces coelicolor | 39,457 | 10-DEC- |
| | | | | | | | | 1997 |
| rxa01975 | 2019 | GB_BA2:CGU13922 | 4412 | U13922 | Corynebacterium glutamicum putative type II 5-cytosoine methyltransferase (cgIIM) | Corynebacterium glutamicum | 99,950 | 3-Feb-98 |
| | | | | | and putative type II restriction endonuclease (cgIIR) and putative type I or type III | | | |
| | | | | | restriction endonuclease (clgIIR) genes, complete cds. | | | |
| | | GB_BA1:SPSNBCDE | 22449 | Y11548 | S. pristinaespiralis snbC gene & snbDE gene. | Streptomyces pristinaespiralis | 36,657 | 25-Apr-97 |
| | | GB_BA1:SPSNBCGEN | 22449 | X98690 | S. pristinaespiralis snbC and snbDE genes. | Streptomyces pristinaespiralis | 36,657 | 24-MAR- |
| | | | | | | | | 1997 |
| rxa01998 | 831 | GB_BA2:AF121000 | 19751 | AF121000 | Corynebacterium glutamicum strain 22243 R-plasmid pAG1, complete sequence. | Corynebacterium glutamicum | 40,520 | 14-Apr-99 |
| | | GB_BA2:AF121000 | 19751 | AF121000 | Corynebacterium glutamicum strain 22243 R-plasmid pAG1, complete sequence. | Corynebacterium glutamicum | 54,699 | 14-Apr-99 |
| | | GB_BA1:FVBPOAD2A | 45519 | D26094 | Flavobacterium sp. plasmid pOAD2 DNA, whole sequence. | Flavobacterium sp. | 38,562 | 6-Feb-99 |
| rxa02002 | 478 | GB_BA1:STYPRFC | 2140 | D50496 | Salmonella typhimurium gene for peptide release factor 3/RF3, complete cds. | Salmonella typhimurium | 53,289 | 10-Feb-99 |
| | | GB_BA2:U32846 | 11650 | U32846 | Haemophilus influenzae Rd section 161 of 163 of the complete genome. | Haemophilus influenzae Rd | 47,265 | 29-MAY- |
| | | | | | | | | 1998 |
| | | GB_BA2:AF072440 | 4316 | AF072440 | Enterobacter gergoviae GTPase (bipA) gene, partial cds; glutamine synthetase | Enterobacter gergoviae | 37,284 | 30-OCT- |
| | | | | | (glnA) and nitrogen regulatory protein (ntrB) genes, complete cds; and nitrogen | | | 1998 |
| | | | | | regulatory protein (ntrC) gene, partial cds. | | | |
| rxa02015 | 619 | GB_PL2:AF015560 | 2681 | AF015560 | Neurospora crassa RO11 (ro-11) gene, complete cds. | Neurospora crassa | 38,953 | 3-Sep-97 |
| | | GB_GSS13:AQ497173 | 511 | AQ497173 | HS_5193_B2_A10_T7A RPCI-11 Human Male BAC Library Homo sapiens | Homo sapiens | 37,086 | 28-Apr-99 |
| | | | | | genomic clone Plate = 769 Col = 20 Row = B, genomic survey sequence. | | | |
| | | GB_PL1:SPAC27D7 | 35892 | AL009227 | S. pombe chromosome I cosmid c27D7. | Schizosaccharomyces pombe | 39,016 | 25-MAR- |
| | | | | | | | | 1999 |
| rxa02025 | 774 | GB_BA1:ECOUW93 | 338534 | U14003 | Escherichia coli K-12 chromosomal region from 92.8 to 00.1 minutes. | Escherichia coli | 39,108 | 17-Apr-96 |
| | | GB_BA2:AE000493 | 10819 | AE000493 | Escherichia coli K-12 MG1655 section 383 of 400 of the complete genome. | Escherichia coli | 39,108 | 12-Nov-98 |
| | | GB_BA1:ECOPMSR | 1270 | M89992 | Escherichia coli peptide methionine sulfoxide reductase gene, complete cds. | Escherichia coli | 50,329 | 26-Apr-93 |
| rxa02065 | 771 | GB_BA2:MSU87307 | 1520 | U87307 | Mycobacterium smegmatis extracytoplasmic function alternative sigma factor (sigE) | Mycobacterium smegmatis | 59,533 | 07-MAY- |
| | | | | | gene, complete cds. | | | 1997 |
| | | GB_BA1:MTCI61 | 13540 | Z98260 | Mycobacterium tuberculosis H37Rv complete genome; segment 53/162. | Mycobacterium tuberculosis | 57,833 | 17-Jun-98 |
| | | GB_BA2:MTU87242 | 3690 | U87242 | Mycobacterium tuberculosis sigma factor SigE (sigE) and HtrA (htrA) genes, | Mycobacterium tuberculosis | 57,833 | 08-MAY- |
| | | | | | complete cds. | | | 1997 |
| rxa02078 | 981 | GB_BA1:MTCY338 | 29372 | Z74697 | Mycobacterium tuberculosis H37Rv complete genome; segment 127/162. | Mycobacterium tuberculosis | 38,050 | 17-Jun-98 |
| | | GB_BA1:MLCB1243 | 42926 | AL023635 | Mycobacterium leprae cosmid B1243. | Mycobacterium leprae | 53,733 | 27-Aug-99 |
| | | GB_BA1:MSGB1723CS | 38477 | L78825 | Mycobacterium leprae cosmid B1723 DNA sequence. | Mycobacterium leprae | 53,733 | 15-Jun-96 |
| rxa02110 | 741 | GB_EST20:AA894760 | 281 | AA894760 | oj55a09.s1 NCI_CGAP_Kid3 Homo sapiens cDNA clone IMAGE: 1502200 3′, | Homo sapiens | 39,928 | 9-Jun-98 |
| | | | | | mRNA sequence. | | | |
| | | GB_EST38:AL119293 | 323 | AL119293 | DKFZp761B161_r1 761 (synonym: hamy2) Homo sapiens cDNA clone | Homo sapiens | 34,579 | 27-Sep-99 |
| | | | | | DKFZp761B161 5′, mRNA sequence. | | | |
| | | GB_PR3:HSJ1031J8 | 155213 | AL118523 | Human DNA sequence from clone RP5-1031J8 on chromosome 20, complete | Homo sapiens | 32,341 | 03-DEC- |
| | | | | | sequence. | | | 1999 |
| rxa02167 | 1383 | GB_BA1:MTCI125 | 37432 | Z98268 | Mycobacterium tuberculosis H37Rv complete genome; segment 76/162. | Mycobacterium tuberculosis | 63,215 | 17-Jun-98 |
| | | GB_BA1:MLCB1351 | 38936 | Z95117 | Mycobacterium leprae cosmid B1351. | Mycobacterium leprae | 38,240 | 24-Jun-97 |
| | | GB_BA1:U00021 | 39193 | U00021 | Mycobacterium leprae cosmid L247. | Mycobacterium leprae | 37,964 | 29-Sep-94 |
| rxa02174 | 477 | GB_BA1:CGGLTG | 3013 | X66112 | C. glutamicum glt gene for citrate synthase and ORF. | Corynebacterium glutamicum | 100,000 | 17-Feb-95 |
| | | GB_PR4:AF117829 | 320250 | AF117829 | Homo sapiens 8q21.3: RICK gene, complete sequence. | Homo sapiens | 37,528 | 13-Jan-99 |
| | | GB_PR4:AF117829 | 320250 | AF117829 | Homo sapiens 8q21.3: RICK gene, complete sequence. | Homo sapiens | 40,733 | 13-Jan-99 |
| rxa02182 | | | | | | | | |
| rxa02204 | 1383 | GB_BA1:MTCY261 | 27322 | Z97559 | Mycobacterium tuberculosis H37Rv complete genome; segment 95/162. | Mycobacterium tuberculosis | 39,846 | 17-Jun-98 |
| | | GB_BA1:ECU82664 | 139818 | U82664 | Escherichia coli minutes 9 to 11 genomic sequence. | Escherichia coli | 47,528 | 11-Jan-97 |
| | | GB_BA2:AE000158 | 10143 | AE000158 | Escherichia coli K-12 MG1655 section 48 of 400 of the complete genome. | Escherichia coli | 47,528 | 12-Nov-98 |
| rxa02228 | 1026 | GB_HTG2:AC007962 | 172091 | AC007962 | Homo sapiens chromosome 17 clone 2511_J_5 map 17, *** SEQUENCING IN | Homo sapiens | 39,051 | 3-Jul-99 |
| | | | | | PROGRESS ***, 25 unordered pieces. | | | |
| | | GB_HTG2:AC007962 | 172091 | AC007962 | Homo sapiens chromosome 17 clone 2511_J_5 map 17, *** SEQUENCING IN | Homo sapiens | 39,051 | 3-Jul-99 |
| | | | | | PROGRESS ***, 25 unordered pieces. | | | |
| | | GB_HTG3:AC008363 | 131230 | AC008363 | Drosophila melanogaster chromosome 3 clone BACR14H24 (D989) RPCI-98 | Drosophila melanogaster | 31,957 | 3-Aug-99 |
| | | | | | 14.H.24 map 92A-92A strain y; cn bw sp, *** SEQUENCING IN PROGRESS***, 91 | | | |
| | | | | | unordered pieces. | | | |
| rxa02236 | 441 | GB_BA2:MSU75344 | 1458 | U75344 | Mycobacterium smegmatis integration host factor (mIHF) gene, complete cds. | Mycobacterium smegmatis | 63,908 | 4-Aug-98 |
| | | GB_BA1:MTCY21B4 | 39150 | Z80108 | Mycobacterium tuberculosis H37Rv complete genome; segment 62/162. | Mycobacterium tuberculosis | 58,957 | 23-Jun-98 |
| | | GB_BA2:AF077324 | 5228 | AF077324 | Rhodococcus equi strain 103 plasmid RE-VP1 fragment f. | Rhodococcus equi | 40,639 | 5-Nov-98 |
| rxa02242 | 630 | GB_EST30:AI667039 | 548 | AI667039 | fc24h04.y1 Zebrafish WashU MPIMG EST Danio rerio cDNA 5′ similar to | Danio rerio | 46,903 | 18-MAY- |
| | | | | | TR: O93510 O93510 HOMOGENIN.;, mRNA sequence. | | | 1999 |
| | | GB_EST30:AI667039 | 548 | AI667039 | fc24h04.y1 Zebrafish WashU MPIMG EST Danio rerio cDNA 5′ similar to | Danio rerio | 38,445 | 18-MAY- |
| | | | | | TR: O93510 O93510 HOMOGENIN.;, mRNA sequence. | | | 1999 |
| rxa02243 | 1068 | GB_EST8:AA050680 | 515 | AA050680 | mj20f12.r1 Soares mouse embryo NbME13.5 14.5 Mus musculus cDNA clone | Mus musculus | 40,313 | 9-Sep-96 |
| | | | | | IMAGE: 476687 5′, mRNA sequence. | | | |
| | | GB_EST28:AI509997 | 372 | AI509997 | mj20f12.y1 Soares mouse embryo NbME13.5 14.5 Mus musculus cDNA clone | Mus musculus | 40,431 | 12-MAR- |
| | | | | | IMAGE: 476687 5′, mRNA sequence. | | | 1999 |
| | | GB_EST27:AI426148 | 445 | AI426148 | mj20f12.x1 Soares mouse embryo NbME13.5 14.5 Mus musculus cDNA clone | Mus musculus | 45,775 | 09-MAR- |
| | | | | | IMAGE: 476687 3′, mRNA sequence. | | | 1999 |
| rxa02252 | 1544 | GB_BA1:MTCY21B4 | 39150 | Z80108 | Mycobacterium tuberculosis H37Rv complete genome; segment 62/162. | Mycobacterium tuberculosis | 63,017 | 23-Jun-98 |
| | | GB_PAT:I32742 | 5589 | I32742 | Sequence 1 from patent U.S. Pat. No. 5589355. | Unknown. | 66,077 | 6-Feb-97 |
| | | EM_BA1:AB003693 | 5589 | AB003693 | Corynebacterium ammoniagenes DNA for rib operon, complete cds. | Corynebacterium | 66,077 | 03-OCT- |
| | | | | | | ammoniagenes | | 1997 (Rel. |
| | | | | | | | | 52, |
| | | | | | | | | Created) |
| rxa02260 | 354 | GB_BA1:CORPEPC | 4885 | M25819 | C. glutamicum phosphoenolpyruvate carboxylase gene, complete cds. | Corynebacterium glutamicum | 100,000 | 15-DEC- |
| | | | | | | | | 1995 |
| | | GB_PAT:A09073 | 4885 | A09073 | C. glutamicum ppg gene for phosphoenol pyruvate carboxylase. | Corynebacterium glutamicum | 100,000 | 25-Aug-93 |
| | | GB_BA1:CGL007732 | 4460 | AJ007732 | Corynebacterium glutamicum 3′ ppc gene, secG gene, amt gene, ocd gene and 5′ | Corynebacterium glutamicum | 100,000 | 7-Jan-99 |
| | | | | | soxA gene. | | | |
| rxa02290 | 522 | GB_GSS11:AQ262166 | 588 | AQ262166 | CITBI-E1-2509J2.TF CITBI-E1 Homo sapiens genomic clone 2509J2, genomic | Homo sapiens | 41,505 | 24-OCT- |
| | | | | | survey sequence. | | | 1998 |
| | | GB_HTG5:AC006209 | 233854 | AC006209 | Homo sapiens clone RP11-546D14, *** SEQUENCING IN PROGRESS ***, 85 | Homo sapiens | 40,719 | 19-Nov-99 |
| | | | | | unordered pieces. | | | |
| | | GB_VI:AF107100 | 2335 | AF107100 | Ecotropis obliqua nuclear polyhedrosis virus ecdysteroid UDP-glucosyltransferase | Ecotropis obliqua nuclear | 38,606 | 4-Apr-99 |
| | | | | | gene, complete cds. | polyhedrosis virus | | |
| rxa02291 | 777 | GB_PL1:ATF17M5 | 96475 | AL035678 | Arabidopsis thaliana DNA chromosome 4, BAC clone F17M5 (ESSA project). | Arabidopsis thaliana | 35,195 | 11-MAR- |
| | | | | | | | | 1999 |
| | | GB_HTG4:AC007621 | 335275 | AC007621 | Homo sapiens chromosome 12p12-21.8-27.2 clone RPCI11-757G14, | Homo sapiens | 36,471 | 21-OCT- |
| | | | | | ***SEQUENCING IN PROGRESS ***, 142 unordered pieces. | | | 1999 |
| | | GB_HTG4:AC007621 | 335275 | AC007621 | Homo sapiens chromosome 12p12-21.8-27.2 clone RPCI11-757G14, | Homo sapiens | 36,471 | 21-OCT- |
| | | | | | ***SEQUENCING IN PROGRESS ***, 142 unordered pieces. | | | 1999 |
| rxa02323 | 1047 | GB_PL1:YSKERD2A | 1248 | M34844 | K. lactis ER lumen protein retaining receptor (ERD2) gene, complete cds. | Kluyveromyces lactis | 37,168 | 27-Apr-93 |
| | | GB_PL2:CNS01AFM | 720 | AL112874 | Botrytis cinerea strain T4 cDNA library under conditions of nitrogen deprivation. | Botryotinia fuckeliana | 39,638 | 2-Sep-99 |
| | | GB_PR1:HAAXTRSYV | 6972 | X90840 | H. sapiens mRNA for axonal transporter of synaptic vesicles. | Homo sapiens | 38,454 | 28-MAY- |
| | | | | | | | | 1996 |
| rxa02386 | 582 | GB_OV:AF131057 | 1875 | AF131057 | Gallus gallus substance P receptor (ASPR) mRNA, complete cds. | Gallus gallus | 38,382 | 18-MAY- |
| | | | | | | | | 1999 |
| | | GB_HTG2:AC008225 | 110418 | AC008225 | Drosophila melanogaster chromosome 3 clone BACR03E11 (D818) RPCI-98 | Drosophila melanogaster | 39,236 | 2-Aug-99 |
| | | | | | 03.E.11 map 84C-84D strain y; cn bw sp, *** SEQUENCING IN PROGRESS***, 76 | | | |
| | | | | | unordered pieces. | | | |
| | | GB_EST10:AA142237 | 594 | AA142237 | CK00013.3prime CK Drosophila melanogaster embryo BlueScript Drosophila | Drosophila melanogaster | 36,519 | 29-Nov-98 |
| | | | | | melanogaster cDNA clone CK00013 3prime, mRNA sequence. | | | |
| rxa02388 | 1785 | GB_RO:RNY16563 | 12507 | Y16563 | Rattus norvegicus mRNA for brain-specific synapse-associated protein, Bassoon. | Rattus norvegicus | 35,082 | 11-Aug-98 |
| | | GB_PR4:AF052224 | 15964 | AF052224 | Homo sapiens neuronal double zinc finger protein (ZNF231) mRNA, complete cds. | Homo sapiens | 36,270 | 09-DEC- |
| | | | | | | | | 1998 |
| | | GB_PR1:AB007894 | 5650 | AB007894 | Homo sapiens KIAA0434 mRNA, partial cds. | Homo sapiens | 36,970 | 13-Feb-99 |
| rxa02413 | 615 | GB_PR4:AC007102 | 176258 | AC007102 | Homo sapiens chromosome 4 clone C0162P16 map 4p16, complete sequence. | Homo sapiens | 36,772 | 2-Jun-99 |
| | | GB_HTG3:AC011214 | 183414 | AC011214 | Homo sapiens clone 5_C_3, LOW-PASS SEQUENCE SAMPLING. | Homo sapiens | 36,442 | 03-OCT- |
| | | | | | | | | 1999 |
| | | GB_HTG3:AC011214 | 183414 | AC011214 | Homo sapiens clone 5_C_3, LOW-PASS SEQUENCE SAMPLING. | Homo sapiens | 36,442 | 03-OCT- |
| | | | | | | | | 1999 |
| rxa02416 | 2952 | GB_BA1:MSGB1133CS | 42106 | L78811 | Mycobacterium leprae cosmid B1133 DNA sequence. | Mycobacterium leprae | 65,083 | 15-Jun-96 |
| | | GB_BA1:MTCY06H11 | 38000 | Z85982 | Mycobacterium tuberculosis H37Rv complete genome; segment 73/162. | Mycobacterium tuberculosis | 66,278 | 17-Jun-98 |
| | | GB_BA1:SCC54 | 30753 | AL035591 | Streptomyces coelicolor cosmid C54. | Streptomyces coelicolor | 39,079 | 11-Jun-99 |
| rxa02418 | 690 | GB_BA1:MTCY06H11 | 38000 | Z85982 | Mycobacterium tuberculosis H37Rv complete genome; segment 73/162. | Mycobacterium tuberculosis | 62,899 | 17-Jun-98 |
| | | GB_BA1:MSGB1133CS | 42106 | L78811 | Mycobacterium leprae cosmid B1133 DNA sequence. | Mycobacterium leprae | 66,473 | 15-Jun-96 |
| | | GB_BA1:SCI35 | 40909 | AL031541 | Streptomyces coelicolor cosmid I35. | Streptomyces coelicolor | 35,958 | 9-Sep-98 |
| rxa02429 | 2346 | GB_BA1:MLCB1788 | 39228 | AL008609 | Mycobacterium leprae cosmid B1788. | Mycobacterium leprae | 40,352 | 27-Aug-99 |
| | | GB_BA1:MTCY1A11 | 30850 | Z78020 | Mycobacterium tuberculosis H37Rv complete genome; segment 83/162. | Mycobacterium tuberculosis | 57,417 | 17-Jun-98 |
| | | GB_PL2:AC007153 | 103223 | AC007153 | Arabidopsis thaliana chromosome I BAC F3F20 genomic sequence, complete | Arabidopsis thaliana | 36,104 | 17-MAY- |
| | | | | | sequence. | | | 1999 |
| rxa02436 | 684 | GB_BA1:MTCY10H4 | 39160 | Z80233 | Mycobacterium tuberculosis H37Rv complete genome; segment 2/162. | Mycobacterium tuberculosis | 63,274 | 17-Jun-98 |
| | | GB_BA1:MLCB1770 | 37821 | Z70722 | Mycobacterium leprae cosmid B1770. | Mycobacterium leprae | 62,719 | 29-Aug-97 |
| | | GB_BA1:SCH69 | 35824 | AL079308 | Streptomyces coelicolor cosmid H69. | Streptomyces coelicolor | 40,237 | 15-Jun-99 |
| rxa02445 | 1812 | GB_PR3:HS864I18 | 106018 | AL031293 | Human DNA sequence from clone 864I18 on chromosome 1p36.11-36.33. | Homo sapiens | 37,409 | 23-Nov-99 |
| | | | | | Contains ESTs, STSs, GSSs, genomic marker D1S2728 and a ca repeat | | | |
| | | | | | polymorphism, complete sequence. | | | |
| | | GB_PR3:HS864I18 | 106018 | AL031293 | Human DNA sequence from clone 864I18 on chromosome 1p36.11-36.33. | Homo sapiens | 38,679 | 23-Nov-99 |
| | | | | | Contains ESTs, STSs, GSSs, genomic marker D1S2728 and a ca repeat | | | |
| | | | | | polymorphism, complete sequence. | | | |
| rxa02456 | 741 | GB_BA2:AF144091 | 2900 | AF144091 | Mycobacterium smegmatis catechol 1,2-dioxygenase (catA) gene, partial cds; | Mycobacterium smegmatis | 57,085 | 15-Jul-99 |
| | | | | | muconolactone isomerase (catC) and sigma factor SigH (sigH) genes, complete | | | |
| | | | | | cds; and unknown genes. | | | |
| | | GB_BA1:MTCY7D11 | 22070 | Z95120 | Mycobacterium tuberculosis H37Rv complete genome; segment 138/162. | Mycobacterium tuberculosis | 35,534 | 17-Jun-98 |
| | | GB_STS:G36947 | 418 | G36947 | SHGC-56623 Human Homo sapiens STS cDNA, sequence tagged site. | Homo sapiens | 36,591 | 1-Jan-98 |
| rxa02462 | 1941 | EM_PAT:E09053 | 2538 | E09053 | gDNA encoding secA protein. | Corynebacterium glutamicum | 99,528 | 07-OCT- |
| | | | | | | | | 1997 (Rel. |
| | | | | | | | | 52, |
| | | | | | | | | Created) |
| | | GB_BA1:MTY20B11 | 36330 | Z95121 | Mycobacterium tuberculosis H37Rv complete genome; segment 139/162. | Mycobacterium tuberculosis | 38,632 | 17-Jun-98 |
| | | GB_BA2:MBU66080 | 4049 | U66080 | Mycobacterium bovis SecA (secA) gene, complete cds. | Mycobacterium bovis | 68,353 | 3-Sep-98 |
| rxa02476 | 1002 | GB_BA1:AB009078 | 2686 | AB009078 | Brevibacterium saccharolyticum gene for L-2.3-butanediol dehydrogenase, | Brevibacterium | 97,309 | 13-Feb-99 |
| | | | | | complete cds. | saccharolyticum | | |
| | | GB_HTG2:AC007933 | 152224 | AC007933 | Homo sapiens chromosome 17 clone hRPC.908_O_12 map 17, ***SEQUENCING | Homo sapiens | 39,959 | 30-Jun-99 |
| | | | | | IN PROGRESS ***, 11 unordered pieces. | | | |
| | | GB_HTG2:AC007933 | 152224 | AC007933 | Homo sapiens chromosome 17 clone hRPC.908_O_12 map 17, ***SEQUENCING | Homo sapiens | 39,959 | 30-Jun-99 |
| | | | | | IN PROGRESS ***, 11 unordered pieces. | | | |
| rxa02502 | 1515 | GB_PR2:AP000548 | 128077 | AP000548 | Homo sapiens genomic DNA, chromosome 22q11.2, Cat Eye Syndrome region, | Homo sapiens | 36,965 | 01-OCT- |
| | | | | | clone: KB556G11. | | | 1999 |
| | | GB_BA1:MSGY348 | 40056 | AD000020 | Mycobacterium tuberculosis sequence from clone y348. | Mycobacterium tuberculosis | 38,198 | 10-DEC- |
| | | | | | | | | 1996 |
| | | GB_PR2:AP000548 | 128077 | AP000548 | Homo sapiens genomic DNA, chromosome 22q11.2, Cat Eye Syndrome region, | Homo sapiens | 35,839 | 01-OCT- |
| | | | | | clone: KB556G11. | | | 1999 |
| rxa02509 | 1994 | GB_BA1:MTCY1A10 | 25949 | Z95387 | Mycobacterium tuberculosis H37Rv complete genome; segment 117/162. | Mycobacterium tuberculosis | 38,806 | 17-Jun-98 |
| | | GB_BA1:MLCL581 | 36225 | Z96801 | Mycobacterium leprae cosmid L581. | Mycobacterium leprae | 38,532 | 24-Jun-97 |
| | | GB_BA1:MTCY1A10 | 25949 | Z95387 | Mycobacterium tuberculosis H37Rv complete genome; segment 117/162. | Mycobacterium tuberculosis | 39,036 | 17-Jun-98 |
| rxa02523 | 942 | GB_BA1:MLCB250 | 40603 | Z97369 | Mycobacterium leprae cosmid B250. | Mycobacterium leprae | 47,284 | 27-Aug-99 |
| | | GB_EST25:AU041363 | 542 | AU041363 | AU041363 Mouse four-cell-embryo cDNA Mus musculus cDNA clone J1001B09 | Mus musculus | 39,180 | 04-DEC- |
| | | | | | 3′, mRNA sequence. | | | 1998 |
| | | GB_EST9:C22241 | 332 | C22241 | C22241 Miyagawa-wase satsuma mandarin orange (M. Omura) Citrus unshiu | Citrus unshiu | 42,638 | 29-Jun-98 |
| | | | | | cDNA clone pcMFRI802.43, mRNA sequence. | | | |
| rxa02557 | 711 | GB_HTG3:AC010964 | 41594 | AC010964 | Homo sapiens chromosome 17 clone 3023_F_18 map 17, *** SEQUENCING IN | Homo sapiens | 36,234 | 28-Sep-99 |
| | | | | | PROGRESS ***, 3 unordered pieces. | | | |
| | | GB_HTG3:AC010964 | 41594 | AC010964 | Homo sapiens chromosome 17 clone 3023_F_18 map 17, *** SEQUENCING IN | Homo sapiens | 36,234 | 28-Sep-99 |
| | | | | | PROGRESS ***, 3 unordered pieces. | | | |
| | | GB_PR2:AC000003 | 122228 | AC000003 | Homo sapiens chromosome 17, clone 104H12, complete sequence. | Homo sapiens | 36,222 | 07-OCT- |
| | | | | | | | | 1997 |
| rxa02563 | 855 | GB_GSS14:AQ570921 | 491 | AQ570921 | HS_5356_B1_H12_T7A RPCI-11 Human Male BAC Library Homo sapiens | Homo sapiens | 35,191 | 1-Jun-99 |
| | | | | | genomic clone Plate = 932 Col = 23 Row = P, genomic survey sequence. | | | |
| | | GB_EST27:AI425057 | 501 | AI425057 | tg50g05.x1 Soares_NFL_T_GBC_S1 Homo sapiens cDNA clone IMAGE: 2112248 | Homo sapiens | 38,723 | 30-MAR- |
| | | | | | 3′, mRNA sequence. | | | 1999 |
| | | GB_EST6:N63837 | 469 | N63837 | za26h12.s1 Soares fetal liver spleen 1NFLS Homo sapiens cDNA clone | Homo sapiens | 36,725 | 01-MAR- |
| | | | | | IMAGE: 293735 3′, mRNA sequence. | | | 1996 |
| rxa02590 | 1059 | GB_PAT:I92041 | 858 | I92041 | Sequence 8 from patent U.S. Pat. No. 5726299. | Unknown. | 34,837 | 01-DEC- |
| | | | | | | | | 1998 |
| | | GB_PAT:I78752 | 858 | I78752 | Sequence 8 from patent U.S. Pat. No. 5693781. | Unknown. | 34,837 | 3-Apr-98 |
| | | GB_HTG2:AC006936 | 221373 | AC006936 | Drosophila melanogaster chromosome 3 clone BACR48I01 (D484) RPCI-98 48.I.1 | Drosophila melanogaster | 36,103 | 2-Aug-99 |
| | | | | | map 93E4-93E7 strain y; cn bw sp, *** SEQUENCING IN PROGRESS ***, 63 | | | |
| | | | | | unordered pieces. | | | |
| rxa02608 | 2094 | GB_BA1:CGCOP1G | 2547 | X66078 | C. glutamicum cop1 gene for PS1. | Corynebacterium glutamicum | 99,140 | 30-Jun-93 |
| | | GB_PAT:A26027 | 2547 | A26027 | C. melassecola gene for extracellular antigen PS1. | Corynebacterium melassecola | 99,045 | 2-Apr-95 |
| | | GB_HTG6:AC008180_2 | 110000 | AC008180 | Homo sapiens clone RP11-292L5, *** SEQUENCING IN PROGRESS ***, 152 | Homo sapiens | 35,990 | AC008180 |
| | | | | | unordered pieces. | | | |
| rxa02625 | 886 | GB_BA1:MTV012 | 70287 | AL021287 | Mycobacterium tuberculosis H37Rv complete genome; segment 132/162. | Mycobacterium tuberculosis | 39,135 | 23-Jun-99 |
| | | GB_BA1:SC8D9 | 38681 | AL035569 | Streptomyces coelicolor cosmid 8D9. | Streptomyces coelicolor | 65,537 | 26-Feb-99 |
| | | GB_BA1:MLCB637 | 44882 | Z99263 | Mycobacterium leprae cosmid B637. | Mycobacterium leprae | 63,995 | 17-Sep-97 |
| rxa02671 | 702 | GB_EST38:AW029724 | 634 | AW029724 | EST272979 tomato callus, TAMU Lycopersicon esculentum cDNA clone | Lycopersicon esculentum | 34,750 | 15-Sep-99 |
| | | | | | cLEC28I17 similar to beta-ketoacyl-ACP synthase, putative, mRNA sequence. | | | |
| | | GB_GSS6:AQ843663 | 631 | AQ843663 | nbxb0024L12r CUGI Rice BAC Library Oryza sativa genomic clone nbxb0024L12r, | Oryza sativa | 41,971 | 04-OCT- |
| | | | | | genomic survey sequence. | | | 1999 |
| | | GB_EST38:AW029724 | 634 | AW029724 | EST272979 tomato callus, TAMU Lycopersicon esculentum cDNA clone | Lycopersicon esculentum | 38,760 | 15-Sep-99 |
| | | | | | cLEC28I17 similar to beta-ketoacyl-ACP synthase, putative, mRNA sequence. | | | |
| rxa02686 | 1260 | GB_BA1:CORPHEA | 1088 | M13774 | C. glutamicum pheA gene encoding prephenate dehydratase, complete cds. | Corynebacterium | 44,279 | 26-Apr-93 |
| | | | | | | glutamicum | | |
| | | GB_PAT:E06110 | 948 | E06110 | DNA encoding prephenate dehydratase. | Corynebacterium glutamicum | 43,836 | 29-Sep-97 |
| | | GB_PAT:E04484 | 948 | E04484 | DNA encoding prephenate dehydratase. | Corynebacterium glutamicum | 43,836 | 29-Sep-97 |
| rxa02692 | 1389 | GB_BA1:MTCY1A6 | 37751 | Z83864 | Mycobacterium tuberculosis H37Rv complete genome; segment 159/162. | Mycobacterium tuberculosis | 35,699 | 17-Jun-98 |
| | | GB_PAT:I60487 | 1260 | I60487 | Sequence 3 from patent 5656470. | Unknown. | 67,383 | 07-OCT- |
| | | | | | | | | 1997 |
| | | GB_BA1:MSGY409 | 41321 | AD000017 | Mycobacterium tuberculosis sequence from clone y409. | Mycobacterium tuberculosis | 63,413 | 10-DEC- |
| | | | | | | | | 1996 |
| rxa02726 | 3057 | GB_BA1:MTCY48 | 35377 | Z74020 | Mycobacterium tuberculosis H37Rv complete genome; segment 69/162. | Mycobacterium tuberculosis | 65,390 | 17-Jun-98 |
| | | GB_PAT:AR009609 | 3905 | AR009609 | Sequence 1 from patent U.S. Pat. No. 5756327. | Unknown. | 65,160 | 04-DEC- |
| | | | | | | | | 1998 |
| | | GB_PAT:AR009610 | 1487 | AR009610 | Sequence 3 from patent U.S. Pat. No. 5756327. | Unknown. | 63,792 | 04-DEC- |
| | | | | | | | | 1998 |
| rxa02731 | 2220 | GB_BA1:MTCY01B2 | 35938 | Z95554 | Mycobacterium tuberculosis H37Rv complete genome; segment 72/162. | Mycobacterium tuberculosis | 70,069 | 17-Jun-98 |
| | | GB_BA1:MSGB1133CS | 42106 | L78811 | Mycobacterium leprae cosmid B1133 DNA sequence. | Mycobacterium leprae | 69,559 | 15-Jun-96 |
| | | GB_BA1:MLUVRB | 2286 | X12578 | Micrococcus luteus gene homologous to E. coli uvrB gene. | Micrococcus luteus | 63,361 | 12-Sep-93 |
| rxa02742 | 2472 | GB_GSS12:AQ364217 | 467 | AQ364217 | nbxb0060L21f CUGI Rice BAC Library Oryza sativa genomic clone nbxb0060L21f, | Oryza sativa | 37,337 | 3-Feb-99 |
| | | | | | genomic survey sequence. | | | |
| | | GB_GSS12:AQ364217 | 467 | AQ364217 | nbxb0060L21f CUGI Rice BAC Library Oryza sativa genomic clone nbxb0060L21f, | Oryza sativa | 39,123 | 3-Feb-99 |
| | | | | | genomic survey sequence. | | | |
| rxa02748 | 1764 | GB_BA1:CAJ10319 | 5368 | AJ010319 | Corynebacterium glutamicum amtP, glnB, glnD genes and partial ftsY and srp | Corynebacterium glutamicum | 99,888 | 14-MAY- |
| | | | | | genes. | | | 1999 |
| | | GB_BA1:MTCY338 | 29372 | Z74697 | Mycobacterium tuberculosis H37Rv complete genome; segment 127/162. | Mycobacterium tuberculosis | 38,016 | 17-Jun-98 |
| | | GB_BA1:MSGB32CS | 36404 | L78818 | Mycobacterium leprae cosmid B32 DNA sequence. | Mycobacterium leprae | 62,730 | 15-Jun-96 |
| rxa02788 | 2787 | GB_BA1:MTCYW318 | 2803 | Z97051 | Mycobacterium tuberculosis H37Rv complete genome; segment 112/162. | Mycobacterium tuberculosis | 39,294 | 17-Jun-98 |
| | | GB_BA1:MSGB937CS | 38914 | L78820 | Mycobacterium leprae cosmid B937 DNA sequence. | Mycobacterium leprae | 60,729 | 15-Jun-96 |
| | | GB_BA1:MLCB1259 | 38807 | AL023591 | Mycobacterium leprae cosmid B1259. | Mycobacterium leprae | 66,993 | 27-Aug-99 |
| rxa02837 | 274 | GB_BA2:PDU08864 | 2215 | U08864 | Paracoccus denitrificans phosphate acetyltransferase (pta) gene, complete cds, | Paracoccus denitrificans | 73,723 | 30-Nov-95 |
| | | | | | and insertion sequence IS1248a, complete sequence. | | | |
| | | GB_BA1:PDU08856 | 1393 | U08856 | Paracoccus denitrificans insertion sequence IS1248b, complete sequence. | Paracoccus denitriticans | 73,723 | 30-Nov-95 |
| | | GB_BA1:ZMO009974 | 4494 | AJ009974 | Zymomonas mobilis genomic DNA clone encoding ORF1 to 4. | Zymomonas mobilis | 37,500 | 3-Aug-99 |
| rxs03207 | 1123 | GB_BA1:BLSIGBGN | 2906 | Z49824 | B. lactofermentum orf1 gene and sigB gene. | Corynebacterium glutamicum | 99,555 | 25-Apr-96 |
| | | GB_BA1:MTCY05A6 | 38631 | Z96072 | Mycobacterium tuberculosis H37Rv complete genome; segment 120/162. | Mycobacterium tuberculosis | 65,474 | 17-Jun-98 |
| | | GB_BA1:MTU10059 | 5900 | U10059 | Mycobacterium tuberculosis H37Rv sigma factor MysA (mysA) and sigma factor | Mycobacterium tuberculosis | 65,474 | 30-Jan-96 |
| | | | | | MysB (mysB) genes, complete cds. | | | |

The application's sequence listing, which the Patent Office published only in electronic form, follows.

SEQUENCE LISTING (618 sequences)

SEQ ID NO: 1 - DNA, 2250 bp, Corynebacterium glutamicum
  CDS (101)..(2227): RXA01278
ttatccgtaggtgacaaactttttaatacttgggtatctgtcatggataccccggtaataaataagtgaattaccgtaaccaacaagttggggtaccactgtggcacaagaagtgcttaaggatctaaacaaggtccgcaacatcggcatcatggcgcacatcgatgctggtaagaccacgaccaccgaacgcatcctcttctacaccggcatcaaccgtaaggtcggtgagacccacgacggtggcgcaaccaccgactggatggagcaggagaaggaacgcggcatcaccattacctccgccgcggttacctgtttctgggataacaaccaggtcaacatcattgacacccctggccacgttgacttcaccgttgaggttgagcgttccctccgcgtgcttgacggcgcagttgctgtgttcgacggcaaggaaggcgttgagccacagtctgagcaggtttggcgtcaggctaccaagtacgacgttccacgtatctgcttcgtgaacaagatggacaagctcggtgctgacttctacttcaccgttggcaccatcgaggaccgcctgggtgcaaagccattggttatgcagctcccaatcggtgctgaggacaacttcgacggcgtcatcgaccttcttgaaatgaaggcactgacctggcgtggagttaccccaattggtaccgaagctaccgttgaggagatcccagcagagctcgcagaccgcgcagctgagtaccgtgagaagcttctcgagaccgttgcagagtccgacgaagagctcatggagaagtacttcggtggcgaagagctcagcatcgctgagatcaaggcagctatccgtaagatggttgttaactctgagatctaccctgtttactgtggcaccgcctacaagaacaagggcatccagccactgctcgacgcagtcgttgacttcctgccttccccactggatctcggcgagaccaagggcactgacgttaaggatcctgagaaggttctgacccgtaagccttccgacgaagagccactgtctgcacttgcattcaagattgcagctcacccattcttcggtaagctgaccttcgttcgtctgtactccggcaaggttgagccaggcgagcaggttcttaactccaccaagaacaagaaggaacgcattggtaagctgttccagatgcacgccaacaaggaaaaccctgttgaggttgcacacgctggtaacatctacgcgttcatcggcctgaaggacaccaccaccggtgacaccctctgtgacgcaaacgctccaatcattcttgagtccatggacttcccggatccagttatccaggttgctattgagcctaagaccaagtctgaccaggagaagctcggcgtagctatccagaagcttgctgaagaagacccaaccttcaccgttcacttggacgatgagtccggccagaccgtcattggcggcatgggcgagctgcacctcgatgttcttgttgaccgcatgaagcgcgagttcaaggttgaggcaaacatcggtgacccacaggttgcttaccgtgagaccatccgtaagcctgttgagtccctcagctacacccacaagaagcagactggtggttccggtcagttcgctaaggtcatcatcaccattgagccttacgcacctgaggcagacgagcttgaagagggcgagtccgcaatctacaagttcgagaacgctgtcaccggtggtcgtgttccacgtgaatacatcccatccgttgacgctggtatccaggacgcaatgcagtacggcttcctggctggctacccactggttaacgtcaaggcaacccttgaagatggcgcttaccacgacgttgactcctctgaaatggccttcaagctcgccggttcccaggcgttcaaggaagctgttgcaaaggcaaagccagtcctcctcgagccaatcatgtccgttgaaatcaccactcctgaggagtacatgggtgaagtcatcggtgacgtgaactcccgccgtggccagatcgcttccatggatgaccgtgcaggcgccaagctggttaaggctaaggttccactgtctcagatgttcggttacgtcggtgaccttcgctctaagacccagggtcgtgcaaactactccatggtcttcgattcctacgctgaggtcccagccaacgttgcagcagatgttattgctgagcgcaacggcaccgcttcctaaagatcgtttagatccgaagg

SEQ ID NO: 2 - protein, 709 aa, Corynebacterium glutamicum
VAQEVLKDLNKVRNIGIMAHIDAGKTTTTERILFYTGINRKVGETHDGGATTDWMEQEKERGITITSAAVTCFWDNNQVNIIDTPGHVDFTVEVERSLRVLDGAVAVFDGKEGVEPQSEQVWRQATKYDVPRICFVNKMDKLGADFYFTVGTIEDRLGAKPLVMQLPIGAEDNFDGVIDLLEMKALTWRGVTPIGTEATVEEIPAELADRAAEYREKLLETVAESDEELMEKYFGGEELSIAEIKAAIRKMVVNSEIYPVYCGTAYKNKGIQPLLDAVVDFLPSPLDLGETKGTDVKDPEKVLTRKPSDEEPLSALAFKIAAHPFFGKLTFVRLYSGKVEPGEQVLNSTKNKKERIGKLFQMHANKENPVEVAHAGNIYAFIGLKDTTTGDTLCDANAPIILESMDFPDPVIQVAIEPKTKSDQEKLGVAIQKLAEEDPTFTVHLDDESGQTVIGGMGELHLDVLVDRMKREFKVEANIGDPQVAYRETIRKPVESLSYTHKKQTGGSGQFAKVIITIEPYAPEADELEEGESAIYKFENAVTGGRVPREYIPSVDAGIQDAMQYGFLAGYPLVNVKATLEDGAYHDVDSSEMAFKLAGSQAFKEAVAKAKPVLLEPIMSVEITTPEEYMGEVIGDVNSRRGQIASMDDRAGAKLVKAKVPLSQMFGYVGDLRSKTQGRANYSMVFDSYAEVPANVAADVIAERNGTAS

SEQ ID NO: 3 - DNA, 948 bp, Corynebacterium glutamicum
  CDS (101)..(925): RXA01913
acctgtacgatcactttttagacgggcgggtagggctactgtgccctaacctaagcttgtaaagcattaattatccatacataaggaggatcgccccgtaatggcgaactacaccgctgcggatgttaagaagctccgcgaactcaccggttccggcatgctcgattgcaagaaggctctggaggagtccgctggcgacttcgacaaggctgttgagatcctgcgcgtcaagggcgcaaaggacgtcggaaagcgtgcagagcgtaacgctaccgaaggtctcgttgcagtttctggcaacaccatggtcgaggtcaactctgagaccgacttcgttgcaaagaactctgacttcaaggaattcgctgcaaaggttgcagacgcagcagcagctgcaaaggctaactcccaggaagagctcgcagcagttgacgtggacggacagaccgcagacgcagctctgcaggagttctccgcaaagatcggcgagaagcttgagcttcgtcgcgcagtaaccctcgagggcgacaagaccgctgtttacctccaccagcgttccgctgacctgccaccagcagttggcgttttggttgctttcaccggtgaaggtgaagcagctgaggcagctgcacgtcaggctgcaatgcagattgctgctctgaaggcttcttacctcacccgtgaggacgttcctgcagagatcatcgagaaggagcgctccatcgctgagcagatcactcgcgaagagggcaagccagagcaggctatccctaagatcgttgagggtcgtttgaatggcttctacaaggagaacgtacttcttgagcagtcctcggtagctgacagcaagaagaccgttaaggctcttctggacgaggctggcgttaccgtcacctccttcgctcgcttcgaggtcggccaggcttaaggccacttgaaggttgtggg

SEQ ID NO: 4 - protein, 275 aa, Corynebacterium glutamicum
MANYTAADVKKLRELTGSGMLDCKKALEESAGDFDKAVEILRVKGAKDVGKRAERNATEGLVAVSGNTMVEVNSETDFVAKNSDFKEFAAKVADAAAAAKANSQEELAAVDVDGQTADAALQEFSAKIGEKLELRRAVTLEGDKTAVYLHQRSADLPPAVGVLVAFTGEGEAAEAAARQAAMQIAALKASYLTREDVPAEIIEKERSIAEQITREEGKPEQAIPKIVEGRLNGFYKENVLLEQSSVADSKKTVKALLDEAGVTVTSFARFEVGQA

SEQ ID NO: 5 - DNA, 1965 bp, Corynebacterium glutamicum
  CDS (101)..(1942): RXN01559
gtctggttgattggaattgaaggagactttcttggctcggcaaaaaaagagtgccgctagcgcctgggaacgatggccaaaacgcgcaatagcgttgtttgtgctcatcgtcgttggtgtttatgcgttggtgctgttgacaggcgatcgttctgccacaccaaaattgggtattgatctgcaaggcggaacccgagtgaccctcgtgccgcaggggcaggatccaactcaggaccagctgaatcaggcacgcaccattctggaaaaccgtgtgaacggcatgggcgtttcaggtgcaagcgtggtcgctgacggtaacacgctggtgatcactgttcccggggaaaataccgcacaggcgcaatccctaggacagacctcccagctgctgttccgtcccgttggtcaggcaggaatgcccgatatgaccacgttgatgccagagctggaagagatggccaacaggtgggttgaatacggcgtcatcaccgaagagcaggcaaatgcctccttggaggaaatgaacaccgctgttgcatcgaccactgcggtggaaggcgaagaagcaactgagccagaacccgtcaccgtgtcggcgacccctatggatgagccagccaactccattgaggcaacacagcgacgccaggaaatcacggacatgctgcgcaccgaccgccagtccaccgatcccactgtccagatcgctgcaagttctttgatgcagtgcaccactgatgagatggatcctttggccggcaccgatgatccacgcctgccattggtggcatgtgatccagctgtaggtggcgtgtatgtacttgatcctgcacctttgctcaacggcgaaaccgatgaggaaaatggtgcgcgcctaaccggtaatgagatcgataccaaccgtcccatcaccggtggattcaacgcccagtccggccagatggaaatcagctttgccttcaaatccggcgatggggaagaaggctctgcaacttggtcctctctgaccagccagtacctgcagcagcagatcgccatcaccctggactctcaggtgatttctgcacccgtgattcagtcagcaacccctgtgggttctgcaacatccatcaccggtgacttcactcaaactgaagcccaagatctggcgaacaacctgcgctacggtgcattgcccctgagcttcgcaggtgaaaacggcgagcgcggcggaactaccaccaccgttccgccatcactaggcgcagcatccttgaaggccggactgatcgcaggcatcgtcggcatcgcgctggtcgccatcttcgtgttcgcctactaccgcgtcttcggattcgtttccctgttcaccctgtttgccgcaggcgtgttggtctacggccttctggtactgctgggacgctggatcggatattccctagaccttgctggtatcgccggtttgatcatcggtatcggtaccaccgccgactccttcgtggtgttctatgagcgcatcaaggatgagatccgtgaaggaagatcctttagatctgcagtacctcgtgcatgggaaagcgccaagcgcaccatcgtcacaggcaacatggtcactttgctcggcgctatcgtgatttacttgctcgcggtcggcgaagtcaagggctttgccttcaccctgggtctgaccaccgtattcgatctcgttgtcaccttcctgatcacggcaccactggttatcctggcatcacgcaacccattctttgccaagtcatcggtcaacggcatgggacgagtgatgaagctcgttgaagaacgccgcgccaacggtgaattggatgagcctgagtacctgaaaaagatccatgccaagaatgcggcagctgataaggcttccactgacaattcttccactgacaattctgaagcacctggcaccgatacgaaccaagaggaggagaagtagccatgactgattcccagact

SEQ ID NO: 6 - protein, 614 aa, Corynebacterium glutamicum
VLIVVGVYALVLLTGDRSATPKLGIDLQGGTRVTLVPQGQDPTQDQLNQARTILENRVNGMGVSGASVVADGNTLVITVPGENTAQAQSLGQTSQLLFRPVGQAGMPDMTTLMPELEEMANRWVEYGVITEEQANASLEEMNTAVASTTAVEGEEATEPEPVTVSATPMDEPANSIEATQRRQEITDMLRTDRQSTDPTVQIAASSLMQCTTDEMDPLAGTDDPRLPLVACDPAVGGVYVLDPAPLLNGETDEENGARLTGNEIDTNRPITGGFNAQSGQMEISFAFKSGDGEEGSATWSSLTSQYLQQQIAITLDSQVISAPVIQSATPVGSATSITGDFTQTEAQDLANNLRYGALPLSFAGENGERGGTTTTVPPSLGAASLKAGLIAGIVGIALVAIFVFAYYRVFGFVSLFTLFAAGVLVYGLLVLLGRWIGYSLDLAGIAGLIIGIGTTADSFVVFYERIKDEIREGRSFRSAVPRAWESAKRTIVTGNMVTLLGAIVIYLLAVGEVKGFAFTLGLTTVFDLVVTFLITAPLVILASRNPFFAKSSVNGMGRVMKLVEERRANGELDEPEYLKKIHAKNAAADKASTDNSSTDNSEAPGTDTNQEEEK

SEQ ID NO: 7 - DNA, 651 bp, Corynebacterium glutamicum
  CDS (1)..(651): FRXA00935
agtgccgctagcgcctgggaacgatggccaaaacgcgcaatagcgttgtttgtgctcatcgtcgttggtgtttatgcgttggtgctgttgacaggcgatcgttctgccacaccaaaattgggtattgatctgcaaggcggaacccgagtgaccctcgtgccgcaggggcaggatccaactcaggaccagctgaatcaggcacgcaccattctggaaaaccgtgtgaacggcatgggcgtttcaggtgcaagcgtggtcgctgacggtaacacgctggtgatcactgttcccggggaaaataccgcacaggcgcaatccctaggacagacctcccagctgctgttccgtcccgttggtcaggcaggaatgcccgatatgaccacgttgatgccagagctggaagagatggccaacaggtgggttgaatacggcgtcatcaccgaagagcaggcaaatgcctccttggaggaaatgaacaccgctgttgcatcgaccactgcggtggaaggcgaagaagcaactgagccagaacccgtcaccgtgtcggcgacccctatggatgagccagccaactccattgaggcaacacagcgacgccaggaaatcacggacatgctgcgcaccgaccgccagtccaccgatcccactgtc

SEQ ID NO: 8 - protein, 217 aa, Corynebacterium glutamicum
SAASAWERWPKRAIALFVLIVVGVYALVLLTGDRSATPKLGIDLQGGTRVTLVPQGQDPTQDQLNQARTILENRVNGMGVSGASVVADGNTLVITVPGENTAQAQSLGQTSQLLFRPVGQAGMPDMTTLMPELEEMANRWVEYGVITEEQANASLEEMNTAVASTTAVEGEEATEPEPVTVSATPMDEPANSIEATQRRQEITDMLRTDRQSTDPTV

SEQ ID NO: 9 - DNA, 266 bp, Corynebacterium glutamicum
  CDS (1)..(243): FRXA01559
atcacggcaccactggttatcctggcatcacgcaacccattctttgccaagtcatcggtcaacggcatgggacgagtgatgaagctcgttgaagaacgccgcgccaacggtgaattggatgagcctgagtacctgaaaaagatccatgccaagaatgcggcagctgataaggcttccactgacaattcttccactgacaattctgaagcacctggcaccgatacgaaccaagaggaggagaagtagccatgactgattcccagact

SEQ ID NO: 10 - protein, 81 aa, Corynebacterium glutamicum
ITAPLVILASRNPFFAKSSVNGMGRVMKLVEERRANGELDEPEYLKKIHAKNAAADKASTDNSSTDNSEAPGTDTNQEEEK

SEQ ID NO: 11 - DNA, 1332 bp, Corynebacterium glutamicum
  CDS (101)..(1309): RXA01558
ccaagaatgcggcagctgataaggcttccactgacaattcttccactgacaattctgaagcacctggcaccgatacgaaccaagaggaggagaagtagccatgactgattcccagactgaatcactgtcaactcagagcgtaaaaccagccaaaaaacgcagttggttcaacagcctctacaccggtgacggcggcattgacttcatcgccaaaaccaaactgtggtactggatcaccggcattttgctggttatctcgatcctgttcatcgccatccgtggcttctccctgagcatcgatttccagggcggtaccaagatgagcatgccagcatcggattactccaccgaacaggtggaggaaacctttactgaagccaccggcattactccggaaatcgtgcagatcgtcggttccggcgacgcccgcaccctggagatctactccgagcgactcagcgatgaggatgtagaaaaagcccgcctggcgatctacgaggaataccaacccctaaactctgagggccagccaagcccagatgccatcggtaattccacggtgtcggaatcatggggttccaccatcacccaacgcatggtgttggctctgattgccttcctggttattgcagcgatctacattgctttccgcctcgagcgtgaaatggccatcgccgccatggcagcattggttgttgacggcatcgtcatcgccggcatctacgccgtcatcggcctcgaagtatccccagcaaccgtcatcggtctgctcaccgtgctgaccttctccatctacgacaccgtcgtggtctttgacaaggtcagagaaaacaccgaaggcttcgaaggcagccgcagacgaacctacgccgaacaagccaacctggcggtcaaccagaccttcatgcgttcgatctccacgacaatcatctctgcacttccgatcatcgctttgatggttgtcgccgtctggatgatgggtgttggcaccctcaaagacctcgcactgatccagctgatcggcgtcatcgaaggcaccttctcctccgtcttcctggcaaccccactgctggtcagcctgaaaaaccgcctgagcaaaaccaaagcgcacaccgcttccgttatgaagttgcgcgacggccaaagcacgcttatcgacgccaccccacacaccaacgccgacgccttcgcgcacggcaccgaaagcgacactgacggtgtgacccccgaagcacctgcaaaacgtacagtaagcaaacccattgtggatgatcaccgatcaagcggaacctggcgaccaggcagaagctaaaccaattggagaacgaagaa

SEQ ID NO: 12 - protein, 403 aa, Corynebacterium glutamicum
MTDSQTESLSTQSVKPAKKRSWFNSLYTGDGGIDFIAKTKLWYWITGILLVISILFIAIRGFSLSIDFQGGTKMSMPASDYSTEQVEETFTEATGITPEIVQIVGSGDARTLEIYSERLSDEDVEKARLAIYEEYQPLNSEGQPSPDAIGNSTVSESWGSTITQRMVLALIAFLVIAAIYIAFRLEREMAIAAMAALVVDGIVIAGIYAVIGLEVSPATVIGLLTVLTFSIYDTVVVFDKVRENTEGFEGSRRRTYAEQANLAVNQTFMRSISTTIISALPIIALMVVAVWMMGVGTLKDLALIQLIGVIEGTFSSVFLATPLLVSLKNRLSKTKAHTASVMKLRDGQSTLIDATPHTNADAFAHGTESDTDGVTPEAPAKRTVSKPIVDDHRSSGTWRPGRS

SEQ ID NO: 13 - DNA, 2412 bp, Corynebacterium glutamicum
  CDS (101)..(2389): RXA02429
tcttacccaccagtgcaatgtaggtcacgtcgtatcacgtctgagggtgattgagtagggttaaacagatgaattcatttagctcaccggaggtataaccgtggccggttttgattggttttggaaggcccttggcggcaaatcgggcagaaaccaaaaacgtagcgtggcaattgtcaatcaggtagaaaaccatgcagcggaattagacgcgctggatgatgttgcattggcgcagcgtgccaaggatctagccagtggtggacgcattgacaatcatgcggaattcctcgccattttgggtgtggcatcgcagcggacattggggctgaagccgtatccggtgcaatcacaggcggtgttgcgtctcattgaaggcgatgtggtgcacatggctaccggtgagggcaagactttggtgggcgcgatggcggccaccggtctggggttgatgggcaagcgagtccattcgattaccgtcaatgattatttggcggtgcgcgatgccgaatggatgcggccattggtcgaatttttcggtctgagcgtggcgagcatcagcgagaagatggatgcaggggagcgtcgacaagcatataaagccgcaattgtctacggacctgtcaatgaaatcggctttgacgtgctgcgtgatcagctaattacccggcgcgaagacgccgtgcagcatggcgccgacgtcgcgattatcgatgaggccgattccgtgcttgtcgacgaggccctggtgccactcgtcctcgccggcaaccagcccggccatgcgccgcgcggcaaaatcaccgatgtggtgcgctcgttgaaagaaaacgacgattacaccatcgacgatgatcgtcgcaacgtcttcctcaccgacaagggtgccgccaaattagagcagcagctgggcatcagcagcctctacgacgatgagcacgtcggctcgacgctcgtgcaggtcaacctcgccctccacgcgcaggcactgctcatccgcgacatccactacatcgtccgcgacagcaaggtcttgcttatcgacgcctcccgcggccgtgtcgccgacctgcagcgctggcccgacggcctgcaagcagcagtggaggccaaggaaggtctcgcggtttctgaaggcggcaagatccttgacaccatcacacttcaggcgttgattggtcgctacccaatggcatgcggcatgacaggtaccgccgtggaggcaaccgatcagctacgcaccttctatgacttgcatgtttctgtcattgagcgcaatcatccgctgaagcgctttgatgaagctgaccgtatctacgccaccatggcggagaaaaaccgcgccatcatcgatgaaatcgcactccttcacagcacggggcagccagtcctggtgggtacccacgatgtggcagagtcggaagaactcgccactgcactgcgtgaactcaacatcgaagtaagcgttctcaacgccaagaatgatgccgaagaagcccagatcatcgcagaggctggcgatattggacgagtgaccgtttccactcagatggccggccgcggtaccgatattcgcctcggtggcgccgatgaagccgactacgatgaagtggtgaaactcggtggactcgccgttatcggcaccgcccgccaccgttctcagcgcctggacaaccagctgcgcggacgtgcgggacgacaaggagatccaggcctgagccttttctttgtctccctcgatgatgatgtggtggtctcaggcgggtcaagggagagcgtgagcgcgcaacccgatgccaccgggctgattgactcagatcgcatccgcgattgggtcggacactgccagcgcgtcaccgaaggacagctgctggaaatccactcccagagctggaattacaacaagctccttgccgatcaacgcgtgatcattgacgagcgccgcgaacgcctcctcgacaccgccttagcgtgggaggaactggcacagcatgcaccagcgcgggctgcagagcttgaagaccttgatcagtccgtgagggaacaggcagcacgagacatcatgctgtaccacctcgattacaactggtcagagcacctcgcgttgatggatgatgtccgcgaatccattcacctgcgcgccatcgccagggaaaccccccttgatgaataccaccgcatcgctgtgcgtgaattcaaggatttggcacaacgcgctgtcgatgatgcggtgtccacgttcaagtctgtgaccatcgatcacgagggtgcccatttggatgatgagggcttggcgcgtccatcagcaacgtggacctacatggtctctgacaacccacttgcgggtagtggtaactcagtgatcagtggcataggaaatatctttagataacctgagaactatgaaattcc

SEQ ID NO: 14 - protein, 763 aa, Corynebacterium glutamicum
VAGFDWFWKALGGKSGRNQKRSVAIVNQVENHAAELDALDDVALAQRAKDLASGGRIDNHAEFLAILGVASQRTLGLKPYPVQSQAVLRLIEGDVVHMATGEGKTLVGAMAATGLGLMGKRVHSITVNDYLAVRDAEWMRPLVEFFGLSVASISEKMDAGERRQAYKAAIVYGPVNEIGFDVLRDQLITRREDAVQHGADVAIIDEADSVLVDEALVPLVLAGNQPGHAPRGKITDVVRSLKENDDYTIDDDRRNVFLTDKGAAKLEQQLGISSLYDDEHVGSTLVQVNLALHAQALLIRDIHYIVRDSKVLLIDASRGRVADLQRWPDGLQAAVEAKEGLAVSEGGKILDTITLQALIGRYPMACGMTGTAVEATDQLRTFYDLHVSVIERNHPLKRFDEADRIYATMAEKNRAIIDEIALLHSTGQPVLVGTHDVAESEELATALRELNIEVSVLNAKNDAEEAQIIAEAGDIGRVTVSTQMAGRGTDIRLGGADEADYDEVVKLGGLAVIGTARHRSQRLDNQLRGRAGRQGDPGLSLFFVSLDDDVVVSGGSRESVSAQPDATGLIDSDRIRDWVGHCQRVTEGQLLEIHSQSWNYNKLLADQRVIIDERRERLLDTALAWEELAQHAPARAAELEDLDQSVREQAARDIMLYHLDYNWSEHLALMDDVRESIHLRAIARETPLDEYHRIAVREFKDLAQRAVDDAVSTFKSVTIDHEGAHLDDEGLARPSATWTYMVSDNPLAGSGNSVISGIGNIFR

SEQ ID NO: 15 - DNA, 1764 bp, Corynebacterium glutamicum
  CDS (101)..(1741): RXA02748
caggtcgttggcaggtagctgacgtgacctgagcgggggcaaccggctaacatgtagggattagcaaccccgcactctagaacctactgggagttcattcgtgtttgagtcactgtccgatcggttgaatagcgcgctttccggcctgcgcggcaaaggaaagctcaccgaggcagacatcaatgcaaccacacgcgagatccgtctcgcgctgctggaagctgacgtttcattaacggttgttcgtgccttcattaaccgaatcaaggaacgcgccgctggtgcagaagtttctcaggcactcaaccccgcgcagcaagtcatcaagatcgtcaacgaggaactggttcagatcctcggtggcgaaacccgccgactgtcactggccaaaaacccaccgaccgtcatcatgctggcaggtctgcagggtgcaggtaagaccaccctcgcaggtaaactgtccaagcacctggtcaagcagggtcacactcctatgcttgttgcctgtgaccttcagcgtccaggcgcagttcagcagctgcaaattgtgggtgaacgcgcaggcgttaccactttcgcaccggatccaggcaccagcatcgactccctcgagcacgaaatgggcacctcccacggtgatccagtcgaggtagcgcgcgcaggtatcgaagaagccaagcgcacccagcacgacatcgtgatcgtggataccgcaggtcgcctcggtatcgatgaaaccctgatgactcaggcacgcaacatccgcgaagccatcaaccctgatgaagtgctctttgtcattgactccatgattggtcaagacgccgtagacaccgccgaagcattccgcgacggcgtcgacttcaccggtgttgtcctgaccaagcttgatggcgacgcccgcggtggtgctgcactatccatccgtgaagtcaccggcaagcccatcatgtttgcctccactggtgaaaaactcgacgacttcgacgtcttccacccagagcgcatggccagccgaatcctgggcatgggtgacgtactgtcactcatcgagcaggccgaagcagtcatggatcaggaaaaggcagaggtcgctgcccagaagttgggctccggcgagctcaccctggaagacttccttgaccaaatgctgatgatccgccgcatgggaccaatcggcaacatcctcaagatgctgcctggtggcaagcagatgtcccaaatggcggacatggttgatgagaagcaactcgaccgcatccaggcgattatccgcggtatgaccccggccgagcgcgataatccaaagatcctcaacgcttccaggcgcaagcgcatcgccaacggttccggtgtgaccgtgtccgaagtaaacaaacttgttgaacgcttcttcgaggctcgcaagatgatgggtcaaatggctggccagtttggcatgggtcctggatcccgcagtgcaaccaagaagcaagccaagggccgcaagggtaagaacggcaagcgtaaaccagccaagaagggcccaacccagccaaagatgccaatgggcggtatgccaggaatgcctgggatgccgggtatgggtggagccggaatgcctgaccttgctgaactacagaagcagcttggtggagcaggtggcggtatgggaggccttggtggcggactcccgggcatgccaaagccgcctaaaggcatggagaacatagatctcaacaacctagacttcggtaagaagtaactttgctttagttggtcggc

SEQ ID NO: 16 - protein, 547 aa, Corynebacterium glutamicum
VFESLSDRLNSALSGLRGKGKLTEADINATTREIRLALLEADVSLTVVRAFINRIKERAAGAEVSQALNPAQQVIKIVNEELVQILGGETRRLSLAKNPPTVIMLAGLQGAGKTTLAGKLSKHLVKQGHTPMLVACDLQRPGAVQQLQIVGERAGVTTFAPDPGTSIDSLEHEMGTSHGDPVEVARAGIEEAKRTQHDIVIVDTAGRLGIDETLMTQARNIREAINPDEVLFVIDSMIGQDAVDTAEAFRDGVDFTGVVLTKLDGDARGGAALSIREVTGKPIMFASTGEKLDDFDVFHPERMASRILGMGDVLSLIEQAEAVMDQEKAEVAAQKLGSGELTLEDFLDQMLMIRRMGPIGNILKMLPGGKQMSQMADMVDEKQLDRIQAIIRGMTPAERDNPKILNASRRKRIANGSGVTVSEVNKLVERFFEARKMMGQMAGQFGMGPGSRSATKKQAKGRKGKNGKRKPAKKGPTQPKMPMGGMPGMPGMPGMGGAGMPDLAELQKQLGGAGGGMGGLGGGLPGMPKPPKGMENIDLNNLDFGKK

SEQ ID NO: 17 - DNA, 909 bp, Corynebacterium glutamicum
  CDS (101)..(886): RXA01355
aggcgcatggcgccgaggtgcagctttgggcgaagaagtatttttcggcacacgtgtgattcaggtcagccttaatgtaatgctgctagagtgaactcccgtgactgatttttctagtgcttcaaatgctgacgattccacgcaggacggtcgtcctggtcgacgtgctggaaagtctaagaaggaatcgaagccaactccgtggtacatcgaaattccagtggttgtggttttgaccctcgcgctgattttcgtgctccagacgtttgtcggacgcatgtacatgattccgagtggttcgatggaacctactttgcacggatgtgagggctgcacgggtgaccgcatcctggtggagaaggtttcttactacttcacggatccagagccgggcgatgttgtggtgttcaagggtactgattcctggaacgttggattcactacgcagcgttccgataattcggtgatccgcggcctgcagaacctgggttcttacgtgggtcttgtcgcacctgatgaaaatgacctggtcaagcgcattatcgccaccggcggtcagactgtttcgtgccaagccggtgatcctggaatcatggttgacggcaaggaagtcgatgacagctacacgctgcaacctgcgcaattccccatcgatgagacctccggttccaccgaatgcggcggcaactatttcggccccatcaccgtgcctggcggcaactacttcatgatgggtgacaaccgcaccaactccatggattcccgctaccacctgggcgatcagtaccaaggaaccatccctgaggaaaacatcaagggcaaagttcaagcaattatcctgccatttagccgaatcggtggcgtcgacgaccctgccatcaaaggctagtaattcgcttttcgacgccc

SEQ ID NO: 18 - protein, 262 aa, Corynebacterium glutamicum
VTDFSSASNADDSTQDGRPGRRAGKSKKESKPTPWYIEIPVVVVLTLALIFVLQTFVGRMYMIPSGSMEPTLHGCEGCTGDRILVEKVSYYFTDPEPGDVVVFKGTDSWNVGFTTQRSDNSVIRGLQNLGSYVGLVAPDENDLVKRIIATGGQTVSCQAGDPGIMVDGKEVDDSYTLQPAQFPIDETSGSTECGGNYFGPITVPGGNYFMMGDNRTNSMDSRYHLGDQYQGTIPEENIKGKVQAIILPFSRIGGVDDPAIKG

SEQ ID NO: 19 - DNA, 360 bp, Corynebacterium glutamicum
  CDS (101)..(337): RXA00107
cccggcgaacttcaacctcgatgacgaatccgagtggtttacctcaggcgagtatcgttacaagttccagcgctacatcaaggtttaaggagcaaacaacatgagcaacgtaaccatttacgccacagattggtgcccttactgccgatccctcctcaaaggtctcgacggccaagagtacgacctcatcgacgtcgaccaagatgaggaagccggcgagtgggttaagtcagtcaacgacggcaaccgcatcgtcccaaccgtgcgctactccgatggcacccacgcaactaatcccctagctgcggaagtaatcgccaaaatcgaagcattagcctaaacgcaaaaaagagcctttcg

SEQ ID NO: 20 - protein, 79 aa, Corynebacterium glutamicum
MSNVTIYATDWCPYCRSLLKGLDGQEYDLIDVDQDEEAGEWVKSVNDGNRIVPTVRYSDGTHATNPLAAEVIAKIEALA

SEQ ID NO: 21 - DNA, 1338 bp, Corynebacterium glutamicum
  CDS (101)..(1315): RXA01613
ttttatagtcatatgcgttgagatacgtggacgacaaagcaccagttagttgccttcccagtccagcccacatccgatttctaaattaggagcacatcttatgtctgagcagccagcttccattaagcattatgacctcatcatcattggtaccggctctggaaactccattcctggaccagagtttgatgataaatcaattgccatcgtggaaaagggtgctttcggcggaacttgcctcaatgtgggctgcatccctaccaagatgtacgtttacgctgcggatatcgctcaagaaattcaggagtctgctcgcctgggtatcgatgcgacggtcaacagcgtggattggccttccatcgtcagccgcgttttcgacaagcgcatcgacctcatcgcgcaaggcggcgaggcttatcgacgtggccccgaaactccaaacatcgatgtgtatgacatgcacgcatcgtttgttgattccaagacaatctccactggtattgccggccaagaacagctgatcagcggtactgacattgtaatcgcaaccggctcccgcccttacatccctgaagctattgcagagtccggcgcacgctactacaccaacgaagacatcatgcgcctggcacagcagcctgaatctttggtgattgttggtggcggtttcatcgctttggaatttgctcacgtttttgaagcgcttggcaccaaggtcaccatcctcaaccgctctgacgtgctgctgcgcgaggcagatgcagacatctccgcgaaaatcctcgagctttccaaaaagcgtttcgacgtccgcctcagcactgcggtcaccgcagtacacaacaaggccgacggcggcgtgaagatctccaccgacaccggcgacgacatcgaggcagatattttgctcgttgccactggtcgcacccctaacggcaaccaaatgaacttggacgccgcaggcatcgagatgaacggtcgttccatcaaggttgatgaattcggtcgcaccagtgttgaaggcgtgtgggcgcttggcgatgtctcctccccttacaagctcaagcacgtagccaatgcggaaatgcgagcaatcaagcacaaccttgccaaccctaatgacctgcagaagatgccacatgatttcgtgccatcagctgttttcaccaaccctcagatctcgcaggtcggcatgactgagcaggaggcgcgtgaagctggcctcgacatcactgtgaagatccagaactactctgatgtggcttatggctgggccatggaagataaggatggattcgttaagctcaattgccgataaggacaccggcaagttggtcg

SEQ ID NO: 22 - protein, 405 aa, Corynebacterium glutamicum
MSEQPASIKHYDLIIIGTGSGNSIPGPEFDDKSIAIVEKGAFGGTCLNVGCIPTKMYVYAADIAQEIQESARLGIDATVNSVDWPSIVSRVFDKRIDLIAQGGEAYRRGPETPNIDVYDMHASFVDSKTISTGIAGQEQLISGTDIVIATGSRPYIPEAIAESGARYYTNEDIMRLAQQPESLVIVGGGFIALEFAHVFEALGTKVTILNRSDVLLREADADISAKILELSKKRFDVRLSTAVTAVHNKADGGVKISTDTGDDIEADILLVATGRTPNGNQMNLDAAGIEMNGRSIKVDEFGRTSVEGVWALGDVSSPYKLKHVANAEMRAIKHNLANPNDLQKMPHDFVPSAVFTNPQISQVGMTEQEAREAGLDITVKIQNYSDVAYGWAMEDKDGFVKLNCR

SEQ ID NO: 23 - DNA, 600 bp, Corynebacterium glutamicum
  CDS (101)..(577): RXA00539
cgacctggcagttcacctttggtctcaccaaagttcacctattagctgacctttatttagatgatgcactaaatcctccccctcaactagggttgcgattatgacttctattcatgacatcagcgtaactctcaacgacggcacagaaaccaccatggcggattgggcgggccaccttttgctcatcgtgaacgtggcatccaagtgcggactcacgccacagtatgaagggcttcaaaaactgtatgaggaataccaagatcgaggcttctttgtcattggcgtgccctgcaatcaattcaacggccaggaacctggaaccgacgctgaggtgtgtgctttcgcgcaaaatcagtacgacgtcaccttcccgctcttgagcaaaaccgaggtgaatggggagggtgcccaccccctgtacaaggtgctcaaagaggcaactgatggtagcgaaatcgagtggaattttgagaaattcctggtagatgcagaaggtaatacgattaagcgctttgctcctcggacggaaccatctgcagctgaggtagtggaagcaatcgaggagaatctccctatctaagggctggctaggtttgacca

SEQ ID NO: 24 - protein, 159 aa, Corynebacterium glutamicum
MTSIHDISVTLNDGTETTMADWAGHLLLIVNVASKCGLTPQYEGLQKLYEEYQDRGFFVIGVPCNQFNGQEPGTDAEVCAFAQNQYDVTFPLLSKTEVNGEGAHPLYKVLKEATDGSEIEWNFEKFLVDAEGNTIKRFAPRTEPSAAEVVEAIEENLPI

SEQ ID NO: 25 - DNA, 870 bp, Corynebacterium glutamicum
  CDS (101)..(847): RXA01020
gattccgcaccatcggccaagtcaccaaaacacgccacgaagacctcgtcaccgtagataagaaaacccccgcattttccgatggatggagaagcttctaatgaccaacaccctatggaattcagtagacgaactccccatccacgactcctggaaaccagtactcaaaccagtcgaagacgccatccgaaaactcggtgtattcctcgcggaagaagaattccttccaccagtagatgacgtattcagagcatttagctacccctttgacgcagtaaaagtactgatcatgggacaagacccatatcccaccccaggacatgccatgggactgagcttttccacccaaccagacgtacgaccactgccacggagcctgaacaatatcttcaaagagctggtgagtgatgtcggctctttaggcgattcggcgtcagagcagggggccttggacttaggtattaacgcgccgggctctgtcgctggcacacaagttgccttgcccgcggacggcgacctccgtgcatggagcaaccaaggcgtcgcattgttcaaccgcgtactcaccgtccacccaggccaggccggaagccacaagggtaaaggctgggaagcggtaaccgaacaggcgattaaagccttggcggagcgggatcaacccttggtggcaatcctgtggggtaaacaagcccaagaggtacagaaattccttggagatacgccgtgtatctgctcagtgcacccatcaccgctgtcggcgtcgagaggcttttttggctctaagccttttagtcgtgcgaacgaaatcttaagcagcctcggtgccaccgagatcgattggtcgctgtaaggtatctgattatgtccagt

SEQ ID NO: 26 - protein, 249 aa, Corynebacterium glutamicum
MTNTLWNSVDELPIHDSWKPVLKPVEDAIRKLGVFLAEEEFLPPVDDVFRAFSYPFDAVKVLIMGQDPYPTPGHAMGLSFSTQPDVRPLPRSLNNIFKELVSDVGSLGDSASEQGALDLGINAPGSVAGTQVALPADGDLRAWSNQGVALFNRVLTVHPGQAGSHKGKGWEAVTEQAIKALAERDQPLVAILWGKQAQEVQKFLGDTPCICSVHPSPLSASRGFFGSKPFSRANEILSSLGATEIDWSL

SEQ ID NO: 27 - DNA, 1203 bp, Corynebacterium glutamicum
  CDS (101)..(1180): RXN00484
acgtaccggtaatccgcttgaaatactgccgaaaatagtctctgagatggaagtcaaagccgtcacatggaatcgacgctatcatcaaccgttatgtgaagtggatgccactctcaaaaagaatctccgtgataaagggattgaagtgcatagccacccaggttttttactcactgaaccctgggaagtcagtaccgctaccggaactccctacaaggtatttacccctttttctaaagccgcatgggaagtagccagagtacatgcatatgaaactgttaaaaacaatgtgcctgtcccctctcacctaacaggaccagaggatgtagagctgcccatcctagaaatggagcaacctttttggtcaacaacgttagttaaggagtgtgctcccggtgaaaaaaatgcttcggaaaaactctttgattttttggaacatctacaggactacccgcaagctcgagacagcttagcccgatccgctacaagtaaattatctgctcatctaaggtttggtgagatcagcatccaccgcgtgtgggcagagactgcagcaatagactctgaaggaactgagttatttcttaaagaacttctctggagagattttgcgtggcatcgactttatgccctgccacacatggacacgcaaaacgttcgtatgcaatttaatcgtttcggatggtcctgggatccgagtgaaaaagataaacttaacactccatccacccctcttatccccaccaaagctgaccaattccatgaggatttagcagcatggcgtgcaggaaaaacaggaattccgctggtcgatgcaggcatgcgagaattatgggccaccgggtcaatgcacaatcgcgtcagaatggtagtagctagttttttaaccaagaatctccagatccattggcgtcatggcgaagaatggttttgggaaactctcgtagatgctgatccagcttctaatgctttcaactggcaatgggctgcgggtagcggagatgacgcttcgccttatttccgtatttttaatccggtcacccaagcgaaaaaatttgatccagatgaaacttatattcgtcgctgggtacccgaatatggaacaccatcatatccggatcccatcgtcgatctgaaagaatcccgtcaaattgctttagacgcctactctgcgattaagtgagtttacgcgcagcttttaaa

SEQ ID NO: 28 - protein, 360 aa, Corynebacterium glutamicum
VDATLKKNLRDKGIEVHSHPGFLLTEPWEVSTATGTPYKVFTPFSKAAWEVARVHAYETVKNNVPVPSHLTGPEDVELPILEMEQPFWSTTLVKECAPGEKNASEKLFDFLEHLQDYPQARDSLARSATSKLSAHLRFGEISIHRVWAETAAIDSEGTELFLKELLWRDFAWHRLYALPHMDTQNVRMQFNRFGWSWDPSEKDKLNTPSTPLIPTKADQFHEDLAAWRAGKTGIPLVDAGMRELWATGSMHNRVRMVVASFLTKNLQIHWRHGEEWFWETLVDADPASNAFNWQWAAGSGDDASPYFRIFNPVTQAKKFDPDETYIRRWVPEYGTPSYPDPIVDLKESRQIALDAYSAIK

SEQ ID NO: 29 - DNA, 1158 bp, Corynebacterium glutamicum
  CDS (101)..(1135): FRXA00484
gatggaagtcaaagccgtcacatggaatcgacgctatcatcaaccgttatgtgaagtggatgccactctcaaaaagaatctccgtgataaagggattgaagtgcatagccacccaggttttttactcactgaaccctgggaagtcagtaccgctaccggaactccctacaaggtatttacccctttttctaaagccgcatgggaagtagccagagtacatgcatatgaaactgttaaaaacaatgtgcctgtcccctctcacctaacaggaccagaggatgtagagctgcccatcctagaaatggagcaacctttttggtcaacaacgttagttaaggagtgtgctcccggtgaaaaaaatgcttcggaaaaactctttgattttttggaacatctacaggactacccgcaagctcgagacagcttagcccgatccgctacaagtaaattatctgctcatctaaggtttggtgagatcagcatccaccgcgtgtgggcagagactgcagcaatagactctgaaggaactgagttatttcttaaagaacttctctggagagattttgcgtggcatcgactttatgccctgccacacatggacacgcaaaacgttcgtatgcaatttaatcgtttcggatggtcctgggatccgagtgaaaaagataaacttaacactccatccacccctcttatccccaccaaagctgaccaattccatgaggatttagcagcatggcgtgcaggaaaaacaggaattccgctggtcgatgcaggcatgcgagaattatgggccaccgggtcaatgcacaatcgcgtcagaatggtagtagctagttttttaaccaagaatctccagatccattggcgtcatggcgaagaatggttttgggaaactctcgtagatgctgatccagcttctaatgctttcaactggcaatgggctgcgggtagcggagatgacgcttcgccttatttccgtatttttaatccggtcacccaagcgaaaaaatttgatccagatgaaacttatattcgtcgctgggtacccgaatatggaacaccatcatatccggatcccatcgtcgatctgaaagaatcccgtcaaattgctttagacgcctactctgcgattaagtgagtttacgcgcagcttttaaa

SEQ ID NO: 30 - protein, 345 aa, Corynebacterium glutamicum
VHSHPGFLLTEPWEVSTATGTPYKVFTPFSKAAWEVARVHAYETVKNNVPVPSHLTGPEDVELPILEMEQPFWSTTLVKECAPGEKNASEKLFDFLEHLQDYPQARDSLARSATSKLSAHLRFGEISIHRVWAETAAIDSEGTELFLKELLWRDFAWHRLYALPHMDTQNVRMQFNRFGWSWDPSEKDKLNTPSTPLIPTKADQFHEDLAAWRAGKTGIPLVDAGMRELWATGSMHNRVRMVVASFLTKNLQIHWRHGEEWFWETLVDADPASNAFNWQWAAGSGDDASPYFRIFNPVTQAKKFDPDETYIRRWVPEYGTPSYPDPIVDLKESRQIALDAYSAIK

SEQ ID NO: 31 - DNA, 1002 bp, Corynebacterium glutamicum
  CDS (101)..(979): RXA02476
cgggcggagttctatcaacattacgcaaaggcataagctttattattccactcggtgtgacatatgacctaaagtgccagtcagtacaatcatttaggtcatgtcatttacagcttttcaaacagccctgctcgtgtggtttagagcaaatgcccgcgatcttgcgtggcgtgatcccaatacttcagcatggggaattctcctttcagaggtgatgagccaacaaactcccgtcgcgcgagtcgagccgatttggcgtgagtggatggaaaaatggcccactccggaagatttcgcgaatgcgagcaccgatgagattttgcggtcgtggggcaagttgggctatccacgtagggcgctgaggttgaaggaatgtgcggaggtgatcgtcgaaaagcatgccggcgaggtgccggatacggtggaggcgctgctcgcgttgccggggatcggtgattacacggcgcgcgcggtcgcggcgtttcattttgggcagcgcgtgccggtggtcgatacgaacgtgcgtcgcgtgtaccagcgcgcggtagccggacgttaccttgcggggcctgcgaaaaagcaagagcttatcgacgtctcccttctccttcccaacactcacgccccagaattctctgccgcaataatggagttgggtgctcttatctgcacggccacttccccaaagtgtgacacctgcccactgcttgaccagtgtcaatggcaaaaacttggctgtccctccccgagtgaagaggagctggcttcagcgaaaaagcgtgtgcagaaatttgtgggaaccgaccgacaagtccgtggcctaatcatggacgtactgcgcaatgccaccgcacctgtgccactatccgcgattgatgtcgtgtggcctgacgatgcccaacgctcccgggcgctgttttcgctcattgaggacggactcgcggaacaaaatgaggcgggttatttccacctgccacggtaaaccactgcgcgcctgcaaaa

SEQ ID NO: 32 - protein, 293 aa, Corynebacterium glutamicum
MSFTAFQTALLVWFRANARDLAWRDPNTSAWGILLSEVMSQQTPVARVEPIWREWMEKWPTPEDFANASTDEILRSWGKLGYPRRALRLKECAEVIVEKHAGEVPDTVEALLALPGIGDYTARAVAAFHFGQRVPVVDTNVRRVYQRAVAGRYLAGPAKKQELIDVSLLLPNTHAPEFSAAIMELGALICTATSPKCDTCPLLDQCQWQKLGCPSPSEEELASAKKRVQKFVGTDRQVRGLIMDVLRNATAPVPLSAIDVVWPDDAQRSRALFSLIEDGLAEQNEAGYFHLPR

SEQ ID NO: 33 - DNA, 891 bp, Corynebacterium glutamicum
  CDS (101)..(868): RXA00102
gggaatgcgatttcgaccaccagtggcacgggaaaccccctcagatacgcttcccaccaggacttttcgtggaggcttcggacggcgctaacctgatgacatgccagaaggtgattccgtattccaactctcccgcaaacttcaattcatgcgcggaagagaagtgctggaaacctccctgcgtgtgccatcagtggcacttcacgatttcaccggtcaaaccgtcaaccgcgtatggccctacggaaaacacctcttcatgcaattcggtgaagagatcctccacacccacctcaaaatggaagggacgtgggctgtccaccgcaaaggcgatcgctggcgcaaacctggacacaccgcgagggtagtgcttgtgctgtcggaaaacatcgaggtggtggggcattccctcggctttgtcagagtgttccccgcaaaccgctactccgaagagatcgcttacctcggccccgacgtccttgccgaagaattcgacatcaacaccgcacggaacaatattgcatcgaacccttcccgaacaattggcgaagccctcctcgaccaatccaacctcgctggagtaggcaacgaataccgcgctgagatctgcttcctcatgggcgtccacccggcgacacaagtaggatacgttgacgtcgaaaaggctctgaagattacccgaagactcatgtgggaaaatcgaaattcgccgattcgagtgaccaccggggttcgacgcgccggggaatccacctatgtgtttgggcgtaacaataaaccgtgcaggagatgccgaaccccaatcgtgaaagccgagttgggggagcgaataatctggtggtgtccgcgctgccaaccgctaaactcgtgaagcatgagactaatactcaa

SEQ ID NO: 34 - protein, 256 aa, Corynebacterium glutamicum
MPEGDSVFQLSRKLQFMRGREVLETSLRVPSVALHDFTGQTVNRVWPYGKHLFMQFGEEILHTHLKMEGTWAVHRKGDRWRKPGHTARVVLVLSENIEVVGHSLGFVRVFPANRYSEEIAYLGPDVLAEEFDINTARNNIASNPSRTIGEALLDQSNLAGVGNEYRAEICFLMGVHPATQVGYVDVEKALKITRRLMWENRNSPIRVTTGVRRAGESTYVFGRNNKPCRRCRTPIVKAELGERIIWWCPRCQPLNS

SEQ ID NO: 35 - DNA, 930 bp, Corynebacterium glutamicum
  CDS (101)..(907): RXN01670
cttatttatattaggttgtcctatcctgaaagtgccgattcccgcaggccacgcttagttttttatcaaatcggcacaccggctactaaggttggtgattatgcctgaaggacacgtgattcatcgactagctggggaactcaccaagaattttggcgataccattttggacgccacttcacctcaaggacgctttacttctgaagcggcgatcatcaacggtcaccgcatcgcggttgcggaggcttacggcaagcacctgttcgtcgagttcgatgcggatcaccctgagcacattttgtatatccatttggggctgattggcacgttgcagtttgaacctgcggaagaaacccgcgggcagattcgcctgcacctttccgacggggagatcgcagctaatttgcgcggaccccaatggtgcaggttgatcaccgatgcagagcgcacccaggccattggaaaattgggcgctgatccgattcgcgatgatgccgatccggaaccaattcggattaaggtgcagcgctcagggcgaagcattggttcgttgttgatggatcagaagcttttcgcaggtgtgggaaatatctaccgtgcggagacacttttccgcctggggatttcaccgttcaccattggaaaagacatcaccacggcacagttccgatccatttgggcggatcttgttgggttgatgaaagacggtgttgtgactggtcggattgatactgtgcgcccggaacacacaccggaggcgatgggtaggccaccgcggaaagatgatcacggcggtgaggtttacacctatcggcgaaccggtcaagagtgctttctgtgcgcaactcccatcaaggagcaggtcatggagggtcgcaacttattttggtgtcccggctgccaacgctagacagattcaccttttgctgt

SEQ ID NO: 36 - protein, 269 aa, Corynebacterium glutamicum
MPEGHVIHRLAGELTKNFGDTILDATSPQGRFTSEAAIINGHRIAVAEAYGKHLFVEFDADHPEHILYIHLGLIGTLQFEPAEETRGQIRLHLSDGEIAANLRGPQWCRLITDAERTQAIGKLGADPIRDDADPEPIRIKVQRSGRSIGSLLMDQKLFAGVGNIYRAETLFRLGISPFTIGKDITTAQFRSIWADLVGLMKDGVVTGRIDTVRPEHTPEAMGRPPRKDDHGGEVYTYRRTGQECFLCATPIKEQVMEGRNLFWCPGCQR

SEQ ID NO: 37 - DNA, 635 bp, Corynebacterium glutamicum
  CDS (1)..(612): FRXA01670
cattttgtatatcatttggggctgattggcacgttgcagtttgaacctgcggaagaaacccgcgggcagattcgcctgcacctttccgacggggagatcgcagctaatttgcgcggaccccaatggtgcaggttgatcaccgatgcagagcgcacccaggccattggaaaattgggcgctgatccgattcgcgatgatgccgatccggaaccaattcggattaaggtgcagcgctcagggcgaagcattggttcgttgttgatggatcagaagcttttcgcaggtgtgggaaatatctaccgtgcggagacacttttccgcctggggatttcaccgttcaccattggaaaagacatcaccacggcacagttccgatccatttgggcggatcttgttgggttgatgaaagacggtgttgtgactggtcggattgatactgtgcgcccggaacacacaccggaggcgatgggtaggccaccgcggaaagatgatcacggcggtgaggtttacacctatcggcgaaccggtcaagagtgctttctgtgcgcaactcccatcaaggagcaggtcatggagggtcgcaacttattttggtgtcccggctgccaacgctagacagattcaccttttgctgt

SEQ ID NO: 38 - protein, 204 aa, Corynebacterium glutamicum
HFVYHLGLIGTLQFEPAEETRGQIRLHLSDGEIAANLRGPQWCRLITDAERTQAIGKLGADPIRDDADPEPIRIKVQRSGRSIGSLLMDQKLFAGVGNIYRAETLFRLGISPFTIGKDITTAQFRSIWADLVGLMKDGVVTGRIDTVRPEHTPEAMGRPPRKDDHGGEVYTYRRTGQECFLCATPIKEQVMEGRNLFWCPGCQR

SEQ ID NO: 39 - DNA, 981 bp, Corynebacterium glutamicum
  CDS (101)..(958): RXA02078
acgctggaaggtgaagaaatgggtcggggagaaggcccgaacaagaagctggccgagcaggaagcagcgcaccaggcattccgaaagcttcgggagtcccgtgcctgaactgcctgaagttgaggtggtgcgccgcggtttagaagatcatatggtcggccacaccatcgtgtccgccacagtgcttcacccgcgcgcagcccgcaatcaactcggcggtggccccgaaatcgaggccaacatcgcagggcttagggtcagcgctgccaagcgacgcggcaaattcctctggcttgagcttatcgacgcaccctccggcgaaacccgtcccgatttagggctactggttcaccttgggatgagtggacaaatgctcatcaaagaaccagatgcaccaattagtccacaccttcgagccaaagtcgagctagataatggcgatgaagtgtggtttgtcgatcaacgcaccttcggttattggtggctcggcgacctagttgatggagtacccgaacgcgtctctcacattgccacagatgtattggatgagtctgctgatttctctgcgattgcgcggaatttgaaatctcggaaatcggagatcaaacgcctcctgcttaaccaagagatcgtctccggcatcggaaatatctatgccgatgaaatgctctggcaagcaaaaattcacccattgcaacgtgccgatcgactgtccctagctcgcttggaagaacttcttcaagctggcaaagacgtgatgaccaaagcacttgctcaaggtggcacctctttcgacgcgctctatgtcaacgtcaatggcaactccggctactttgcgctgtcattgaatgcttatgcgcaaaccggggagccgtgcggacgctgcggaacattaatcatccgggagagtttcatgaaccgcggctcccactactgcccaaactgccagaagcggcgctagctgatgagcgaagcttttga

SEQ ID NO: 40 - protein, 286 aa, Corynebacterium glutamicum
VPELPEVEVVRRGLEDHMVGHTIVSATVLHPRAARNQLGGGPEIEANIAGLRVSAAKRRGKFLWLELIDAPSGETRPDLGLLVHLGMSGQMLIKEPDAPISPHLRAKVELDNGDEVWFVDQRTFGYWWLGDLVDGVPERVSHIATDVLDESADFSAIARNLKSRKSEIKRLLLNQEIVSGIGNIYADEMLWQAKIHPLQRADRLSLARLEELLQAGKDVMTKALAQGGTSFDALYVNVNGNSGYFALSLNAYAQTGEPCGRCGTLIIRESFMNRGSHYCPNCQKRR

SEQ ID NO: 41 - DNA, 1902 bp, Corynebacterium glutamicum
  CDS (101)..(1879): RXA01596
tcccaggtcagcggggtaattcgaaaaccattcgaacaattttcgaggatttagaaaaaacgttcgcataaattgttagaactgatgtacactttgaggcatgctcgtagacattgctattgagaacctcggagttattccagcggcctcagctgagttcagctcaggtttaacagtgctcaccggtgagaccggcgccggaaagaccatggtagtgacaggtttacgcctgttatccggcggtcgcgccgacgcttcacgcgtgcgcacaggatcccctcaagctgttgtggaggggcgctttgttacgcaaggcgtgccctgcgacattgtcgaacgtgcaaccggaatcgtttcgaacgccggaggtgccgcagatgaaaatggagagtttttagctgtccgttccgtcggcgccaacggccgttcaaaagctcatctcggtggtcgctccgtacctgcggcaacgctgtccgagttctctgatgagctgttgaccatccacggtcaaaatgaccaactccggttgctctccccagaacgccaactagaggcgcttgatcgttttgatccagagctggcccaactgcgcaaaaactacaacgccaagtacctcacttggaagtccttggataaagatctgcagaagcgcctgagtagtaggcgagagctggctcaagaagtcgatcgcctgcaattcgcgattaatgagatcgaggaagtctcgccacagccaggcgaagacgccgaactggttgagcagatccgcaggctccaggacgtggacaccctgcgggagcaagctgcaaccgcattggctgcgattgatggtgccggctctctcagcgacgccatgggtggttccggcggctttgatgaatcccaggagtcagcctctgaccagctcggccaggcggagtccgcgctggcaggcagtgatgactcaaagctgaaagatattgccgttcagcttgcggaaatcaccagccagctcagccaagtgtccatggaattgggcgggttcctctctgatctccccgcagacccccaagcactcgatgacatgctcacccgccaacagcaattgaaactgctcacgcgtaaatacgctgcagatattgacggcgtgattgagtggcagcggaaagcccaaatccgcctagacagcattgacatttcctccgaagcgcttgacaagctgaaagaagacgcgaaaaaggcgcaggcctccatgatgcgtgccgctaagaagctttcagctgtccgtgcaaaggcagcaaccaagttggggacaactgtcaccgaggagcttcagggcctggccatgcaaaaagcccgctttgaggttgctttgacctccattgaggcgtgcgccagcggtatcgaccaggtggaattccagctcgcagcaaatgcctttgcacagcctcgtccacttgcatcctctgcgtctggtggtgaactttcccgcgttatgttggcgctcgaggtgatcttggctgctggaaccacgggcaccaccttggtgttcgacgaggttgatgcaggtgtgggcggacgcgcagcggtggaaatcggtcgccgcctggcccgccttgccaccaaaaaccaagtcatcgtggtcacccatctcccacaggtcgctgcttacgccgacacgcacctgcacgttgccaagaatgtaggagaagcctccgtgacctcaggagtggagtcactgaccttcgaccgacgcgtggaagagctctcccgcatgctcgctggcctcgacgacaccgccaccggccgagcccacgcaacggagctgctcgagcgtgcacagcgtgaaaaggaagatattaacgaggagcgagtagaaccacttctcgccgccagtgcataagagttttcttggaatttttt

SEQ ID NO: 42 - protein, 593 aa, Corynebacterium glutamicum
MLVDIAIENLGVIPAASAEFSSGLTVLTGETGAGKTMVVTGLRLLSGGRADASRVRTGSPQAVVEGRFVTQGVPCDIVERATGIVSNAGGAADENGEFLAVRSVGANGRSKAHLGGRSVPAATLSEFSDELLTIHGQNDQLRLLSPERQLEALDRFDPELAQLRKNYNAKYLTWKSLDKDLQKRLSSRRELAQEVDRLQFAINEIEEVSPQPGEDAELVEQIRRLQDVDTLREQAATALAAIDGAGSLSDAMGGSGGFDESQESASDQLGQAESALAGSDDSKLKDIAVQLAEITSQLSQVSMELGGFLSDLPADPQALDDMLTRQQQLKLLTRKYAADIDGVIEWQRKAQIRLDSIDISSEALDKLKEDAKKAQASMMRAAKKLSAVRAKAATKLGTTVTEELQGLAMQKARFEVALTSIEACASGIDQVEFQLAANAFAQPRPLASSASGGELSRVMLALEVILAAGTTGTTLVFDEVDAGVGGRAAVEIGRRLARLATKNQVIVVTHLPQVAAYADTHLHVAKNVGEASVTSGVESLTFDRRVEELSRMLAGLDDTATGRAHATELLERAQREKEDINEERVEPLLAASA

SEQ ID NO: 43 - DNA, 1434 bp, Corynebacterium glutamicum
  CDS (101)..(1411): RXA01493
cctgctgcaggctataccgctcgtggtacggaaatcgaagccctcgatacgttgattgaagcaaccgttaccttgggggagtctttgcgaagctcggcgcatgtcgatgtctaacaacgactttgagcatgagtcccatgatgtttctgcaaagcagatcttcgggctcgcgttccccgcactgggtgttctagctgcgatgccgctgtatctcttgttggatacagcggttgttggcactttgggtggcttcgaattggctgcgttgggcgcagcaacaacaattcaagctcaagtgacaacacagctgacattcttgtcctatggaactaccgcgagatcatcgagaattttcggaatgggtgatcgccggggagcaattgccgaaggtgtgcaagcaacctgggtggcactctttgtaggcttgggcatcttaacgctgatgctcattggagccccgactttcgcgttgtggctcagtggtgatgaagctctagcccaagaagcagggcattggctccgggtcgctgcttttgcggtgccactaattctcatgatcatggctggcaacggttggttaagaggtattcaaaacaccaagctgccactctatttcaccttggcgggagtcatccccggcgcgatcttgattccgatattcgtggctaagtttggacttgtgggctctgcctgggcaaacctcattgcagaagcaattactgcttcgctgtttttgggtgcattgatcaagcaccacgaaggttcgtggaagccgagctggacggtgatgaaaaatcagttggttcttggacgtgatttgatcatgcggtcaatgtcgttccaggttgcttttctttccgcggccgctgtggctgcacgatttggcacggcatccttggcggcccaccaggtgttgcttcagctgtggaatttcatcacattggtgctggattctctagctatcgcggcgcagaccttaactggtgcagccctgggcgctggaactgcgaaggtcgcccgcagggtgggtaatcaggtgattaagtactctctgattttcgctggtggcttaggtttggtgttcgtggtcttacactcgtggattccgcgtattttcactcaggacgccgacgttttagatgcgattgcttccccgtggtggatcatggtcgcgatgatcattttgggtggcattgtctttgctattgatggtgtgctgttgggtgctgctgacgcggtgttcctccgaaatgcctctatcttggcggttgtggtcggattcttaccaggcgtctggatttcctatgcattagatgcagggctgacaggcgtgtggtgtggtttgctggcgtttattctgatccgactatttgcggtgatttggcggtttaagtctatgaagtgggcgcgttagcttcggcgcgtggcaaacca

SEQ ID NO: 44 - protein, 437 aa, Corynebacterium glutamicum
MSMSNNDFEHESHDVSAKQIFGLAFPALGVLAAMPLYLLLDTAVVGTLGGFELAALGAATTIQAQVTTQLTFLSYGTTARSSRIFGMGDRRGAIAEGVQATWVALFVGLGILTLMLIGAPTFALWLSGDEALAQEAGHWLRVAAFAVPLILMIMAGNGWLRGIQNTKLPLYFTLAGVIPGAILIPIFVAKFGLVGSAWANLIAEAITASLFLGALIKHHEGSWKPSWTVMKNQLVLGRDLIMRSMSFQVAFLSAAAVAARFGTASLAAHQVLLQLWNFITLVLDSLAIAAQTLTGAALGAGTAKVARRVGNQVIKYSLIFAGGLGLVFVVLHSWIPRIFTQDADVLDAIASPWWIMVAMIILGGIVFAIDGVLLGAADAVFLRNASILAVVVGFLPGVWISYALDAGLTGVWCGLLAFILIRLFAVIWRFKSMKWAR

SEQ ID NO: 45 - DNA, 702 bp, Corynebacterium glutamicum
  CDS (101)..(679): RXA02671
gtccttgaacacctcgttgacgtcgttttaaacttcgaaggtgaccgccactcctccttaagaatgctccgtggcatcaaaaaccgcttcggtgccaccgatgaagtcgggctgcttcgaacaacaatccgacggcatcaaagaagtccccgatccctccggactcttcctctcccaccgcggctctaccccagacggcaccgcggtcaccgtcgccatggatggcgtgcgcccgctattagcggaggttcaaagcttgcttgtcgacgccccctccaagaatccacgcagggtcgtcacgggcctcgacgccaatcgggtccccatggtccttgcggtgttatccgcacgcgccggacgccaaacccaaggaaaagacgcttacgtggcaaccgttggtggcatgaaagttggcgaaccagcaacagacctcgctgtcgcgctcgctactgcctcggctttagccaagaaaccactaccagataaaacagtggtactcggtgaagtcggcttggccggagaaatccgtcgcgtccccaacgttgatcgcagactagccgaggcggaacgtttaggttatgaaaaagcagtcatccccggaggctcaggcatcaaacaaacaagcctgagagtcatcgaagcttcaacacttgccgaagcacttgcagcagtaagcttataaagcatgacaccaacaaccac

SEQ ID NO: 46 - protein, 193 aa, Corynebacterium glutamicum
MKSGCFEQQSDGIKEVPDPSGLFLSHRGSTPDGTAVTVAMDGVRPLLAEVQSLLVDAPSKNPRRVVTGLDANRVPMVLAVLSARAGRQTQGKDAYVATVGGMKVGEPATDLAVALATASALAKKPLPDKTVVLGEVGLAGEIRRVPNVDRRLAEAERLGYEKAVIPGGSGIKQTSLRVIEASTLAEALAAVSL

SEQ ID NO: 47 - DNA, 777 bp, Corynebacterium glutamicum
  CDS (101)..(754): RXN02291
ttgtccatatcctccattgtgcaggagaactttagtgcctacgcttttcgacgatcccctccaccaacttcccagaccaccgcgcagggttgcagctggcgtggtgcacctgcccaacttcctcggcttggccgagcaaaaggcactggtcgcccaggctcgagaccttgcgcgtgaagttgtgggcacaccgttggcgatggtccgacccaagctgaaaagtggtcagatgagtgtccatatgttgcatttaggaaagtactgggcatccaatccttatcgctatgtggatgtcgttgatggttttccagtgccaccactgccggattctttcgtggacttggcacaccgagcattgctgtctgcaggatctttaagcaattcacttcagtcttggtcggaggcatatcgagcagaagcggcattggtgaattactactcgccagatgcttcaatgggcatgcaccaagacgctaatgaagaatcggaagcccctgtgatctccctatcgatcggtgataccggaatctttcgactgggcggcactctaaaccgcaataaaccgtggacagatatcccactaatgagtggtgatctcatcgttttcggaggtgcaaacaggcaagcatttcatggcattccctctattgaggccaatactgcacctgcaggatgcgggttgaaagaaggggaatcaacatcacgatccgccaacttgcactataaaactccaggtagaggtatgtctcgggggtgaaatagccccgcaatgtccca

SEQ ID NO: 48 - protein, 218 aa, Corynebacterium glutamicum
VVHLPNFLGLAEQKALVAQARDLAREVVGTPLAMVRPKLKSGQMSVHMLHLGKYWASNPYRYVDVVDGFPVPPLPDSFVDLAHRALLSAGSLSNSLQSWSEAYRAEAALVNYYSPDASMGMHQDANEESEAPVISLSIGDTGIFRLGGTLNRNKPWTDIPLMSGDLIVFGGANRQAFHGIPSIEANTAPAGCGLKEGESTSRSANLHYKTPGRGMSRG

SEQ ID NO: 49 - DNA, 777 bp, Corynebacterium glutamicum; identical to SEQ ID NO: 47
  CDS (101)..(754): FRXA02291

SEQ ID NO: 50 - protein, 218 aa, Corynebacterium glutamicum; identical to SEQ ID NO: 48

SEQ ID NO: 51 - DNA, 1274 bp, Corynebacterium glutamicum
  CDS (70)..(1251): RXN01733
atctcaatcggacaaaagcaggcgcgttatccaatccacttcccaccgactaaaaggaggtcagacccgatgcacatccgttctttggaattacgtgattaccgttcctggcctgaactcaaagtggatttggaacctggaattacagtttttatcggccgcaacggttttggtaaaaccaacatcgtcgaggccatcggctatcttgcgcatttgtcatcgcatcgggtgtcctctgatgcgccattggtgcgggcgcacgctgaaaacgcccgagtttcggcggttgctgttaatcaaggccgagaattggcagctcacttgctgatcaaaccccatgctgcgaatcaggcaagtttgaatcgcacaaaagtcaggactccccgggagctgcttggtgtggtgaaaacggtgctgtttgcgccggaagatttggcattagtcaaaggcgagccagcagaacgtcgccgctatttagatgacattattgccactcgccagcctcggatggcgggggtcaaggccgactacgacaaggtgctgaaacaaaggaacgccctgctcaagaccgccaccattgcgcttcgtcgaggttacggcaccgaggaaggcgcagctgcgctgagtactttggatacctgggatggccagttggcacgcctgggtgctgaagtgatggcagccagatttgccctgctcaatgagttggggccgaaaatctatgaggcttacaccacgatcgccccggaatcccggccagctgcggtgaattacaaaaccaccatcgatcaaggcctgtcgcagttttccgaattcgatgccggcatcatcgaagccacgctgctgacagaattggcagcgaaacgtcaacgagaaatcgaacgcggctcaagcctggtcggcccccaccgcgatgatgtcgatttaatgctcggcgatcagcccgccaaaggctttgccagccacggcgagacctggtctttcgcgctttcactgcgaattgcagaatttaacctgctgaaatccgatggcaccgacccgatcctcatcttggatgatgtgttttccgagctcgacgccggccgtcgcgaaaaactcgtgggcatagcgcaagaggtggaacaggtgctcatcaccgctgcagtccacgacgatctgccggagaatctcaagaaagtgctcactgcgcagcacaccgtcaccgtccaagacaccggcaccgggcggatttcactcctggatgtgcaaccatgacagatccaattgagcaggca

SEQ ID NO: 52 - protein, 394 aa, Corynebacterium glutamicum
MHIRSLELRDYRSWPELKVDLEPGITVFIGRNGFGKTNIVEAIGYLAHLSSHRVSSDAPLVRAHAENARVSAVAVNQGRELAAHLLIKPHAANQASLNRTKVRTPRELLGVVKTVLFAPEDLALVKGEPAERRRYLDDIIATRQPRMAGVKADYDKVLKQRNALLKTATIALRRGYGTEEGAAALSTLDTWDGQLARLGAEVMAARFALLNELGPKIYEAYTTIAPESRPAAVNYKTTIDQGLSQFSEFDAGIIEATLLTELAAKRQREIERGSSLVGPHRDDVDLMLGDQPAKGFASHGETWSFALSLRIAEFNLLKSDGTDPILILDDVFSELDAGRREKLVGIAQEVEQVLITAAVHDDLPENLKKVLTAQHTVTVQDTGTGRISLLDVQP

SEQ ID NO: 53 - DNA, 566 bp, Corynebacterium glutamicum
  CDS (1)..(543): FRXA01733
gggccgaaaatctatgaggcttacaccacgatcgccccggaatcccggccagctgcggtgaattacaaaaccaccatcgatcaaggcctgtcgcagttttccgaattcgatgccggcatcatcgaagccacgctgctgacagaattggcagcgaaacgtcaacgagaaatcgaacgcggctcaagcctggtcggcccccaccgcgatgatgtcgatttaatgctcggcgatcagcccgccaaaggctttgccagccacggcgagacctggtctttcgcgctttcactgcgaattgcagaatttaacctgctgaaatccgatggcaccgacccgatcctcatcttggatgatgtgttttccgagctcgacgccggccgtcgcgaaaaactcgtgggcatagcgcaagaggtggaacaggtgctcatcaccgctgcagtccacgacgatctgccggagaatctcaagaaagtgctcactgcgcagcacaccgtcaccgtccaagacaccggcaccgggcggatttcactcctggatgtgcaaccatgacagatccaattgagcaggca

SEQ ID NO: 54 - protein, 181 aa, Corynebacterium glutamicum
GPKIYEAYTTIAPESRPAAVNYKTTIDQGLSQFSEFDAGIIEATLLTELAAKRQREIERGSSLVGPHRDDVDLMLGDQPAKGFASHGETWSFALSLRIAEFNLLKSDGTDPILILDDVFSELDAGRREKLVGIAQEVEQVLITAAVHDDLPENLKKVLTAQHTVTVQDTGTGRISLLDVQP

SEQ ID NO: 55 - DNA, 777 bp, Corynebacterium glutamicum
  CDS (101)..(754): RXA01252
gttgctaaacgcagggccgggttctcgatgaacccggcttttgtcatgtatgcaatactgttccttgtccaatttttagttcagataggtagtgtaagacgtgtttgaaggcccactccaggatctcatcgacgaactttctcgtctccccggcgtcggccccaaaagtgcccaacgcatcgcatttcacctgctcaacgtagatccttccgacattacccgccttcaggaagccctcggaggcgtgcgtgatggcgtccaattctgccgcatctgctgcaacatttcccgcgaagaagtctgtcgcatctgctccgactccggacgtgacggcggaacaatctgtgtcgtcgaagaaccaaaagacatccaagttatcgagcgcaccggcgaattctccggccgctaccacgtcctcggcggcgccctcgacccgctggccaacatcggcccccgcgaactcaacatttccacgctcctgcagcgcatcggcggcgtcctgccagaccgtgagctcgcagattccacgcctgaaaataagcttttcgacgccacccccaccgtccgcgaagtcatcctcgcaacagaccccaacaccgaaggcgaagccaccgcctcatacctcggccgcctcttgaaagacttcccagatctggtaatttcccgcctcgcatccggaatgccactaggcggcgacctcgaattcgtcgacgaactcactctctcccgagcattgagtggccgcctgcagatctagcccctcctttacaggctggc

SEQ ID NO: 56 - protein, 218 aa, Corynebacterium glutamicum
VFEGPLQDLIDELSRLPGVGPKSAQRIAFHLLNVDPSDITRLQEALGGVRDGVQFCRICCNISREEVCRICSDSGRDGGTICVVEEPKDIQVIERTGEFSGRYHVLGGALDPLANIGPRELNISTLLQRIGGVLPDRELADSTPENKLFDATPTVREVILATDPNTEGEATASYLGRLLKDFPDLVISRLASGMPLGGDLEFVDELTLSRALSGRLQI

SEQ ID NO: 57 - DNA, 1002 bp, Corynebacterium glutamicum
  CDS (101)..(979): RXA01878
ggttcaggctgcacaaggttggggagcatggcctgcttgcaccgcaagcttgggcatccgatagtagaaatctggcatccaataggtagattgggatgctatggaagaaccctcaggtgcacagctgctcggcccggtagaaatccgtgcgctggcagaaaagctcgacgtcacaccaactaagaagttggggcagaactttgttcacgatcccaacacggtgcgtcgcattgttgctgcggcagagctcaccccaaacgaccacgtggtggaagttggccctggtctgggctctctgacccttgccctggtggaatctgctgcttcagtaactgcggtggaaattgatccccgtttggctgcggaattgccggagacttttcagtggcgcgcgccggcccttgctcacaagttgagcatcgtgctgaaagacgccctgaaggttcaacaatccgatatggctgttcaacccaccgccttggtggctaacttgccgtacaacgtctctgtccctgtcttgttgcacatgatggaggagtttcccaccatcaacaaggtgcttgtcatggtgcaggcagaggttgctgatcgtttggctgcggatccaggatcgaagatttatggtgtgcctagcgtgaaggcgtccttctacggtccagttactcgcgccgggtcgattggtaagaatgtcttttggccagctccaaagatcgaatccggtttggtgaagatcgtgcgcgaagacaccgcgtggaagcaggacgatgagacgcgtaagaaggtgtggccgatcattgatgctgctttcttgcagcgccgtaaaaccctaagagctgcgctttctggacactacggttctggccaggcagctgaggaagctttgcgggccgctgatattgatccaacgcttcgtggcgaaaagcttgatgtcactgactatgtgcgcctagctggggtgttgcagcaaaaggatgagaagtgaaaattaccgctaaggcgtgg

SEQ ID NO: 58 - protein, 293 aa, Corynebacterium glutamicum
MEEPSGAQLLGPVEIRALAEKLDVTPTKKLGQNFVHDPNTVRRIVAAAELTPNDHVVEVGPGLGSLTLALVESAASVTAVEIDPRLAAELPETFQWRAPALAHKLSIVLKDALKVQQSDMAVQPTALVANLPYNVSVPVLLHMMEEFPTINKVLVMVQAEVADRLAADPGSKIYGVPSVKASFYGPVTRAGSIGKNVFWPAPKIESGLVKIVREDTAWKQDDETRKKVWPIIDAAFLQRRKTLRAALSGHYGSGQAAEEALRAADIDPTLRGEKLDVTDYVRLAGVLQQKDEK

SEQ ID NO: 59 - DNA, 872 bp, Corynebacterium glutamicum
  CDS (1)..(849): RXA01556
aacatccgctttgagaccctcaacatcatgggacctgcgcgtcgcatccacctgggtcacgtgtggaatgatcgcctgacctttgaatacagtcgctcgctgttcggtaaagagaccctgtcgccagacatcgcgcgcctgttcaccgaccgcgttcccacccctccgctgccagctccgcgtaaagcgcgcgcagtggcgcaggtgctggtgtccaaccctgcggatcagaccagtttggaagaatttgcggagatccaaggcgtttcggcgcgtactttgcagcgccagttcctcaaatccacgggctattcattcagcgaatggcgtgctgcgcagcgcgtctgcgtcgccgcgagcctgctggcccacgacttcagcatttcagtggttgcgaacctcgtcgggttcgccgcgaccagcagcttgaccagagcttttcgacgccacaccggtgcaactccgtccacctttactactggacagatcggcatgggctccgcaggtcacccaccacgcatcccagcaaccaccacgtttgccgaagcgcatcaggaccagcagctgtggatttacagcggaaccgcaaccgtcaccacccccggctactgccgattcatgggacaaggtgacatggtgaccatccctgccggcacccaaacccgcattgacgtggcagccggatccatcgcattcccagtcccagttggactcgacgaatggggaatggacctaacccgcgtcgtggctgttaataaccagcagccaaagccactgaccattttggaacagtctgaatggtccaagctcagcgaagaacttctgaacactcctgtacctgtacaaatgtgaaggtagtaaaggtgtgaaaa

SEQ ID NO: 60 - protein, 283 aa, Corynebacterium glutamicum
NIRFETLNIMGPARRIHLGHVWNDRLTFEYSRSLFGKETLSPDIARLFTDRVPTPPLPAPRKARAVAQVLVSNPADQTSLEEFAEIQGVSARTLQRQFLKSTGYSFSEWRAAQRVCVAASLLAHDFSISVVANLVGFAATSSLTRAFRRHTGATPSTFTTGQIGMGSAGHPPRIPATTTFAEAHQDQQLWIYSGTATVTTPGYCRFMGQGDMVTIPAGTQTRIDVAAGSIAFPVPVGLDEWGMDLTRVVAVNNQQPKPLTILEQSEWSKLSEELLNTPVPVQM

SEQ ID NO: 61 - DNA, 516 bp, Corynebacterium glutamicum
  CDS (101)..(493): RXA00053
aaggcaacagaaaatcaatctacccctgcggggtgcaacacaaaggggcacttcattactgttagcattgggtttctgaccagtagttctgaggagaatcgtgaagaaacgcatcaatgtaaccggcgccgtcctagtcaaggaaaaccgtatccttgcagcacaacgtggtccagagatgtcacttcccggatattgggagtttccgggaggaaagatcgagcagggcgaaactccagaagcttcacttgcacgagagctcaaagaagaattgctttgcgacgccaccgtaggcgaacacctcaccactacagagcacgagtacgactttggaatcgtcgtgctttccacctacttctgcacactaaatgatgcagagcctcaattgaccgagcatgctgagatccgctgggtggcaccacacgaattggaatctttggagtgggcacctgctgatattcctgcggtgaaacttctcgtcgagcagcttgcttaatgagcccattcgattcaaag

SEQ ID NO: 62 - protein, 131 aa, Corynebacterium glutamicum
VKKRINVTGAVLVKENRILAAQRGPEMSLPGYWEFPGGKIEQGETPEASLARELKEELLCDATVGEHLTTTEHEYDFGIVVLSTYFCTLNDAEPQLTEHAEIRWVAPHELESLEWAPADIPAVKLLVEQLA

SEQ ID NO: 63 - DNA, 624 bp, Corynebacterium glutamicum
  CDS (101)..(601): RXA00280
tccccatttccatcccggatcattgtttcagaatagcgtgactcatgacatgttgaaagtattggctaccttgatgaatacccccagcgtttagcctaatgtggacaccatgaaaggcgacggcgatggatgggcagcagcacccaatggcggggcagtatggggcaaaaacggagcagcaggattgttgttggtagcagataaacaaatgctcatgcagcaccgagccgcatggaccaacaacggcgacacctgggcactccctggaggcgcacgagactcacatgaaaccgcagcggaatcagccctgcgtgaagcatttgaagaaactggaatcctgcccgacgacgtggaagttttagattcaatagtcaccgcaggcccttttcccgccgatccagaacgcccagaacttgccggcaactggacctacaccacggtcatcgcacgaactaaaaccggcgaaaccctagataccaccgctaatgaagaatccctcgaactacggtgggtagatatcgcagcggttgactctttggctttgatgccagcattcgccaaagcgtggccctctttaagaaagctactgaacacaacagagtaggtttatgcgacactggtgcg

SEQ ID NO: 64 - protein, 167 aa, Corynebacterium glutamicum
VDTMKGDGDGWAAAPNGGAVWGKNGAAGLLLVADKQMLMQHRAAWTNNGDTWALPGGARDSHETAAESALREAFEETGILPDDVEVLDSIVTAGPFPADPERPELAGNWTYTTVIARTKTGETLDTTANEESLELRWVDIAAVDSLALMPAFAKAWPSLRKLLNTTE

SEQ ID NO: 65 - DNA, 657 bp, Corynebacterium glutamicum
  CDS (101)..(634): RXA00333
gtacgctttgttgaaggccatactctaaccctagatggtggtgtcgcagggctggcgtaacctgggagtcaaagattaccaattggagaggttttgctgcatggcggttccagagttcattgttagtttgcgggagaaggtcggtcaggatccgttgtggttgccggctgtaactgcggttgttattcgtgatgttcctccggggtctcctttccatgtggttccggatgtgttgttggtcaagcgcgctgatactggtgagtggactccaccgaccggtatttgtgatccggatgagcagcctcatgtgactgcggtgcgtgaagtcaaggaggaaaccggccttgatgtcagcgttgaggcgttgcttggcgtgggcgcggtggggcctgtgacctatcaaaatggtgatgtggcgagctacatggatacgaccatgcgttgcgttgtttctggtgattccgatgagcctcacgtcggcgatgacgagaacgtggatgttgcatggttcccgatttctaagatgcctgtcactaatcagcgtttccgcatggtcatcgctgatgcggtggcacagttgaagcatccgcaaggttataagccccgcatgggatatgagaaaaggaatgcacgatgagtattgaatttccgttaggt

SEQ ID NO: 66 - protein, 178 aa, Corynebacterium glutamicum
MAVPEFIVSLREKVGQDPLWLPAVTAVVIRDVPPGSPFHVVPDVLLVKRADTGEWTPPTGICDPDEQPHVTAVREVKEETGLDVSVEALLGVGAVGPVTYQNGDVASYMDTTMRCVVSGDSDEPHVGDDENVDVAWFPISKMPVTNQRFRMVIADAVAQLKHPQGYKPRMGYEKRNAR

SEQ ID NO: 67 - DNA, 741 bp, Corynebacterium glutamicum
  CDS (101)..(718): RXA02110
gaaacacttcccttagagtcaaagtgactgtaagatagctcaacagttaaagtcagattgaccctaaggtggtttcttgcccgcttcacctgaaatccagatggccgtatccacgatcatcttcgcgctgcgccccggcccccaggatctccccagcctgtgggcccccttcgttccgcgcacccgcgaaccacatttaaataaatgggcactgcccggcggttggctgccaccacatgaagaacttgaagatgctgctgcccgcacactcgcagaaaccaccggcctgcaccccagctatctagaacagctctacactttcggaaaagtcgaccgctccccaaccggacgcgtgatctctgtggtgtattgggcacttgtccgagccgatgaagcgttgaaagccatcccaggagaaaacgtccagtggtttcccgccgatcatctccctgagctggcatttgaccacaataacatcgtcaaatatgcactagaacgacttcgcaccaaggtggaatactccgaaatcgcccactccttcctcggagaaaccttcaccatcgcccagcttcgatccgtgcatgaggcagtccttggacacaaactcgatgccgccaacttccgaagatccgtggccacctcgcccgatctgatcgacaccggcgaagtgcttgcgggaacaccgcaccgcccacccaaactgttcagattccaaagataaattctgacgctcattccagc

SEQ ID NO: 68 - protein, 206 aa, Corynebacterium glutamicum
MAVSTIIFALRPGPQDLPSLWAPFVPRTREPHLNKWALPGGWLPPHEELEDAAARTLAETTGLHPSYLEQLYTFGKVDRSPTGRVISVVYWALVRADEALKAIPGENVQWFPADHLPELAFDHNNIVKYALERLRTKVEYSEIAHSFLGETFTIAQLRSVHEAVLGHKLDAANFRRSVATSPDLIDTGEVLAGTPHRPPKLFRFQR

SEQ ID NO: 69 - DNA, 522 bp, Corynebacterium glutamicum
  CDS (101)..(499): RXA02290
tgaacttgtaatctgcgctgatgaaaagtcacggccccgctgggcatctagaagtgagctgtgttgggagtatttcgacaatgagtggggcagacctccggtggatctcaatgctctttttgagatcttgacgttggtagttttccaagtgggtgtcacctggcatgctgtgctgtccaaacgggaagggttccgtcaagcattcgcccaattcgatgttgcaaaagtagccgccttcaatgaggacgacgtggaacgcctacttgatgatctacagatttttagaaaccgaagaaaaatcaacgctgccatcaccaatgccaaagcgttgctggagttaaacgatgaaacaggcacctttgactcaattattgccgaccactcaactgacgccacagccatggtgaagcatctcaaagccttgggctttacccatatcggactgacctccttgagcatcctccagcaggccattggggtcacagagctgaaggctgcctaagatataactccgatgacaac

SEQ ID NO: 70 - protein, 133 aa, Corynebacterium glutamicum
VDLNALFEILTLVVFQVGVTWHAVLSKREGFRQAFAQFDVAKVAAFNEDDVERLLDDLQIFRNRRKINAAITNAKALLELNDETGTFDSIIADHSTDATAMVKHLKALGFTHIGLTSLSILQQAIGVTELKAA

SEQ ID NO: 71 - DNA, 711 bp, Corynebacterium glutamicum
  CDS (101)..(688): RXA02557
cacaaattgaaatgatgctcagggaacaattgcgcaaggctggtcggttgcctaaaaatattggggatatcccgagacccggccgccccaaggagaatccatgagttcattaatcgttggcacggacggcctcagtcgcccgagttgggctgcgcaagatcccctgatgcgcgattattacgacaccgagtggggaatgccgattcgcgatgaacagggattattcgaaagagttagtctggaagcttttcaatccgggctgtcctgggcgacgattttgcgcaagcgcgatagtttccgcgcagctttctctcagtttgatccggaattagtcgcaaaattcaccgatgctgacatcgaacgcctcatggaggacgccggcatcgtgcgcaacaaacgtaaaattttggccaccattaacaacgccaaagccacccttcaattgcgtgagaagggtggcttggtggaatttgtatggggtttcaaaccgattgataccccacagccggagaccctggaggagattccgacgcagtcgccggagtcagttgcactgtctaaggcgctgaagaaggaaggtttttccttcgttggtcccacgacgatgtttgcccttatggaagccataggaatcgtcgacacccatttggtgggcagccatcgccgcggaagttctggggtgtgggcttaggaaatcagccagtcgtttgg

SEQ ID NO: 72 - protein, 196 aa, Corynebacterium glutamicum
MSSLIVGTDGLSRPSWAAQDPLMRDYYDTEWGMPIRDEQGLFERVSLEAFQSGLSWATILRKRDSFRAAFSQFDPELVAKFTDADIERLMEDAGIVRNKRKILATINNAKATLQLREKGGLVEFVWGFKPIDTPQPETLEEIPTQSPESVALSKALKKEGFSFVGPTTMFALMEAIGIVDTHLVGSHRRGSSGVWA

SEQ ID NO: 73 - DNA, 110 bp, Corynebacterium glutamicum
  CDS (1)..(87): RXA02130
atgacctccgacctgcaatccaggcgacgcctcggactgactgccaccctcgtgcgcgaagacggacgagaaggcgatgtctcagcctgatcggccccaagcgttacgac

SEQ ID NO: 74 - protein, 29 aa, Corynebacterium glutamicum
MTSDLQSRRRLGLTATLVREDGREGDVSA

SEQ ID NO: 75 - DNA, 2472 bp, Corynebacterium glutamicum
  CDS (101)..(2449): RXA02742
gtatcggtaaaaggcccaatcaaggattcttggttgggtctttttccatgcttttcatgcttcgaacagtccagaatagccctgacctagacttagagctatgtccgaacaaagactcgatcagcttgagcgacggctttctgaactggaacgggagatcgccgcgattcgtcaggagatccgccaggaacgcctagtgcttccggaaccggaacctgtgaaagttgatacagtcatcgccaccgaagcgaccggagtcaatgcatcgtcgggtccggaggcgaagatcgctttgttcatggagaggtttagtggtcgccacgatgtgtatgcgcggcgctggaccagcagaaaaacgggcaaaagtggatggtcgccggctactcgccagggtttttactcaaaagacaccacaccgaaggactatctccccttcaccgttgacaccgtcaatgcgcatctgcgccggggcggcgaccatatcggtctctatgtgatggtccccatcgacacgtgcaaacttctcgcctgcgatttcgacgatggcacctggaagcaagatgcggccgctttcgtgtcagcctgcaccgaccacggaatcgatgcgttggctgaaatttctcgatccgacgacggcgcccccgtgtggatatttttcgataccccaatctccgcgatgctggctcggcgcctaggttttgccatgctccgccaagccatgaactcccgccctgacatggatatgtcttcttatgatcgcttcttccctgctcaagacaccatcgcaacgcgcgcaaacggaagcgcacggctgggaaatttgatcgcgctgcccctcaacggcgactgtcgagcccgcaacaccgccgtcttcgccgattcggaaacgtgggttcccttcgaagatcctttcgcagcgctcgcggccatcacgccactagccaccgaaaaaatcgagcagatccttgccaccacgcaggaaaaatttggccccgaacccgaacacatcaaacgccccacccgcgccgaactcaaacaggttaaagccaacggcgaaaccatcaaactcaccatcaccaacgagctgagcgtccccaccgaaaggttacccgcggccgtcatcgcggagattaaacaccgggcggtaatcccaaaccctgagttttatcgtcgacaagcgcaaagattttcgaccttcggcgtgccgcgcatcgtcatccgcttcgcccaggccgagcagcgcttgctgctcccacgcgggcttgtcgacgacaccctccggatcctcaccctcgccgggtacaaagtcagcgtcatctggcctcggcaaactcggaaaaccatcgacgcgtctttcgagggcgaattgcgatccatgcaacaagagggaatcgactcgctcaaaggccaacgcaccggcgtattggtagcaccgccgggcgctggaaaaacagtgatggcctgtgcactcatcgcgaacagaaaaatccccaccgcagtgatagtcaaccgtgcagaattgatttcccaatggcgggatcgtctcgcgcaatacctgagcatcgacgcagactccatcggacagatcggcgcgggccgacgcaaaaccaccggaattatcgatctcatcaccgtccaatccttgagccgtaaagattccgatccgaaaattttggaacaatacggccaaatcatcgtcgacgagtgccacaacatcgcagccccaggcgccgaagccgcattgaaccaggtcaaggccccctactggctgggtctaaccgccacgccgtttcgttcagaccacatggatgaaatcatcaccatgcagtgcggtcctgtgcgccaccgcatggaagtggcaacagacaatgaacagcgcttgattcacatccacgaaacctctttcgactctgaggaaaccaccgaaatccaggatctctacaatgagctcgcggtcgattctgcccgaaatgcgcaaatcactgccgaagtgcacaaagcgcttgaagctggcgaccgatgtctagttttggtcaaccgaattgcagcccttgaagcactgaccagcagtattaccgaatctggcgatcacactgtcttagtgatgcatggccgccaaacccaagaggagcgagttcaccttcgtgcgcaacttgcctcattgagtgaaaagcaggatccgtttgtactggtcgcgatgaataaagtcgccggcgaaggccttgacatccccagcctcaacacgctgtttttggcagcgccggtgtccttcaaggggctggtgattcagcaaatcggccgagttactcgcgcaaccggtgatcaaaacgctcctccggtgactgccacggtccatgattttgttgattccaagattccgacactcaaacgcatgcacggtcgccgattgcgggctatgcaaaaggaaggattcgctgtttcggagccttgaggaggaccagaccaaaccag

SEQ ID NO: 76 - protein, 783 aa, Corynebacterium glutamicum
MSEQRLDQLERRLSELEREIAAIRQEIRQERLVLPEPEPVKVDTVIATEATGVNASSGPEAKIALFMERFSGRHDVYARRWTSRKTGKSGWSPATRQGFYSKDTTPKDYLPFTVDTVNAHLRRGGDHIGLYVMVPIDTCKLLACDFDDGTWKQDAAAFVSACTDHGIDALAEISRSDDGAPVWIFFDTPISAMLARRLGFAMLRQAMNSRPDMDMSSYDRFFPAQDTIATRANGSARLGNLIALPLNGDCRARNTAVFADSETWVPFEDPFAALAAITPLATEKIEQILATTQEKFGPEPEHIKRPTRAELKQVKANGETIKLTITNELSVPTERLPAAVIAEIKHRAVIPNPEFYRRQAQRFSTFGVPRIVIRFAQAEQRLLLPRGLVDDTLRILTLAGYKVSVIWPRQTRKTIDASFEGELRSMQQEGIDSLKGQRTGVLVAPPGAGKTVMACALIANRKIPTAVIVNRAELISQWRDRLAQYLSIDADSIGQIGAGRRKTTGIIDLITVQSLSRKDSDPKILEQYGQIIVDECHNIAAPGAEAALNQVKAPYWLGLTATPFRSDHMDEIITMQCGPVRHRMEVATDNEQRLIHIHETSFDSEETTEIQDLYNELAVDSARNAQITAEVHKALEAGDRCLVLVNRIAALEALTSSITESGDHTVLVMHGRQTQEERVHLRAQLASLSEKQDPFVLVAMNKVAGEGLDIPSLNTLFLAAPVSFKGLVIQQIGRVTRATGDQNAPPVTATVHDFVDSKIPTLKRMHGRRLRAMQKEGFAVSEP

SEQ ID NO: 77 - DNA, 1812 bp, Corynebacterium glutamicum
  CDS (101)..(1789): RXA02445
tgtataaagtgacgctctcagtgtagaaactgagggtctcagtgaagtagactgacagggatacctaatacgtttaatagattgtggggcactcgccaccgtggaaccattcgaattagagaaagaccttgagcgtcttaggaaaaacggaaaagacgatgaaaccgtagaagtgaaatcttggggtcggttacctttaagcaaaggatcaaaaagcttctgggaatcattaagcgcattcgcaaacaccaacggtggatacatcctattggggctaagcgaaccagatttcactccagttgaaggatttgattcacaggcgagtatccagttcattcgtgcaggtttaaatccacaagatcgcgacgcccaaaaagtggaaccagtgccccatcatgaaattcatgaaatgactgttgatggtgctgaagttgttttagtttcagtctcaccgttgtcagtgaacgggccctgttattatcttcccgtcggaatcactaatggcagcttcaaacgcgttggcgatgaagaccggaagctcagtcatcttgaaatttacgagctccaaaataggtttgttcaaaccaaaacagatagaaatccagttccagattcaagcattgacgatctcaacaatcagctcgcggcgtcatttaagcagcgcctaattgagtcaaatagtcgctcccttggaacagacgataactggttactgcgcaaaaatatcactacatcaaagggagaactgacgattgctggcttactggctctcggaagctatcctcaacagtttttcccccgagtgatcattgatgttgccgtacatccaggtctgcataagtcaccaatcggtacctcaattcgttttgaagaccgaaaaatctgcgagggaaatcttctcgagatggttcaagaggctatgtctgccatcaaacgaaacctacgtgtacgccgcgtcgttgaaggactctcaggtaaagatgttctagaaatcccagaagaagttttgagagaggctctagcaaacgccgtacttcaccgtgattattctgagctagctcaaaatgaagcaattcatgtagacatctataaggatcgagttgagatcacgagtccaggtggattacccaatggtaaacgcccagagtcaatactggacggatactctgaaccaagaaatcgtgtgctttcaagaatcctaatggatattccatggacacatgaagtacaaggagtacttgctgaaagcaacggtactggcgttccccgaatgttcaatttgatgcgtgaagcgggacttccggtaccgaattttaagattgatatttctagcgtcactgtcgaactcagccgtcacggtcttctagatgcccaaacaagtgaatggcttgtagaaaaactcggatcagatttttctaacacacaaggcattgctcttgttctcgcaaaagaacttggagcggtaacgtctcgagatctccgcaatcaaactggtcatgattcagaagacatgcgcagcttacttgacgctttggttgatcggggcgttctaaaccaaaacttacagaaccaatatcagcttgcgacatcgtctgtgaatgtaactcaaagcgaacaagaagtcttagatgcaatcaataaaacaactcctgtcacaattcgagaaattgccacaaaaacagggaaaactgcatcgtctcttcggccgctgcttcgtggccttgttgaagcaggtcttgtggttgcaactgctccaccatcaagccgcaaccgagcgtacttgaaggcttgacccaccaacgaactcaccgg

SEQ ID NO: 78 - protein, 563 aa, Corynebacterium glutamicum
VEPFELEKDLERLRKNGKDDETVEVKSWGRLPLSKGSKSFWESLSAFANTNGGYILLGLSEPDFTPVEGFDSQASIQFIRAGLNPQDRDAQKVEPVPHHEIHEMTVDGAEVVLVSVSPLSVNGPCYYLPVGITNGSFKRVGDEDRKLSHLEIYELQNRFVQTKTDRNPVPDSSIDDLNNQLAASFKQRLIESNSRSLGTDDNWLLRKNITTSKGELTIAGLLALGSYPQQFFPRVIIDVAVHPGLHKSPIGTSIRFEDRKICEGNLLEMVQEAMSAIKRNLRVRRVVEGLSGKDVLEIPEEVLREALANAVLHRDYSELAQNEAIHVDIYKDRVEITSPGGLPNGKRPESILDGYSEPRNRVLSRILMDIPWTHEVQGVLAESNGTGVPRMFNLMREAGLPVPNFKIDISSVTVELSRHGLLDAQTSEWLVEKLGSDFSNTQGIALVLAKELGAVTSRDLRNQTGHDSEDMRSLLDALVDRGVLNQNLQNQYQLATSSVNVTQSEQEVLDAINKTTPVTIREIATKTGKTASSLRPLLRGLVEAGLVVATAPPSSRNRAYLKA

SEQ ID NO: 79 - DNA, 1212 bp, Corynebacterium glutamicum
  CDS (101)..(1189): RXA00927
agatgatgcagtgagctttgtgctggcggcggatccatccttggacaccagtggcgcgcttcgtgccgcattggcaaaactcagcggaaagtagaccctcatgtccgatgtggaaagaacagagtttgaaattccgggaggaattccacctcgtcgaaacggtggtcaaggccgtgcagctgataccaacgtagatgcgaacctgaagcctgatgaatacgatgcggaagtaacacttcgtccgaagtctttgactgagtttatcggccagccgaaggtgcgcgatcagcttagtttggtgcttaccggtgcgaaaaaccgtggtgtggttcccgatcacgtgttgttgtctggccctcctggcctgggtaagaccaccatggcgatgattatcgcccaggagttgggcaccagtttgcgtatgacctcaggcccagccttggaacgcgcaggcgatctggctgccatgctgtccaacctcatggaaggggacgtgctgtttattgatgagattcaccgcatcgcacgtcctgccgaggaaatgctgtacatggcgatggaagatttccggatcgatgtcatcgtcggtaagggtcctggcgctacctcaatcccgctggagatcccaccctttaccctcgttggtgcaaccaccaggtcgggcatgctcaccggcccactgcgtgaccgtttcggttttaccgcgcagatggaattctacgatgtgcctgatctgaccaaagtggtgaaacgaacagctaagatcctcgatgtcggaatcgacaacgatgccgccgtggaaattgcctcgcggtctcgtggtactcctcgtattgctaaccgactgcttcgtcgagtccgtgacttcgctgaagttcatgcggatggtcacatcacgatgggtgctgccaatgctgcgctgattgtattcgatgtcgatgaagtcggactcgatcgcctggatagggcagtgcttgatgccttgatccgcggacatggcggaggccctgttggcgtgaacacactcgcggttgcagttggtgaagaacccggcactgtggaagaagtatgcgagccctatttggtgcgtgccggcatgattgcacgaaccggacggggacgcgtggcaaccgcagctgcatggagacacctggggctggaaccaccagaaggcaccatcggcgattattagccaccttaggtggccaggat

SEQ ID NO: 80 - protein, 363 aa, Corynebacterium glutamicum
MSDVERTEFEIPGGIPPRRNGGQGRAADTNVDANLKPDEYDAEVTLRPKSLTEFIGQPKVRDQLSLVLTGAKNRGVVPDHVLLSGPPGLGKTTMAMIIAQELGTSLRMTSGPALERAGDLAAMLSNLMEGDVLFIDEIHRIARPAEEMLYMAMEDFRIDVIVGKGPGATSIPLEIPPFTLVGATTRSGMLTGPLRDRFGFTAQMEFYDVPDLTKVVKRTAKILDVGIDNDAAVEIASRSRGTPRIANRLLRRVRDFAEVHADGHITMGAANAALIVFDVDEVGLDRLDRAVLDALIRGHGGGPVGVNTLAVAVGEEPGTVEEVCEPYLVRAGMIARTGRGRVATAAAWRHLGLEPPEGTIGDY

SEQ ID NO: 81 - DNA, 741 bp, Corynebacterium glutamicum
  CDS (101)..(718): RXA00928
tgcatccgatcctgctaaagcggctcatcccagtcagtttcaacgaactgacaccaattagtttttaaaaagttctagtacatttttcaggagtgtcttcatgattgcctcacttcgtggcactgttatcaacattggtctgagctctgctgtcattgaatgcaatggcgtgggctatgaggttgtcaccacaccgaacaccttgtcacagttggtccgcggtgaggaagcactggtgttgaccaccatggtggtccgcgaagacgcgatgaaactctatgggtttattgacaatgaatcacgtgagatgttttccgtgttgcaaacagtatctggattgggtccacgcctggccttggcatgtgaatcggtgttgagcccactggagatttctcaggcgatcaccaatgccgatgccaaaactttgcagcgggttccgggtgtgggaaagcgcatggcagatcgtctcatcgtggagcttaaaggcaaggtcgcagcttttgctgccggtgtcgtggatgagggaggggagcaaatttccttgcctaacgcgaacattgcttctgaggtggttgtggagcaggtttctcaagcgctggtggggttgggctttagcgagaagcaatcagatgatgcagtgagctttgtgctggcggcggatccatccttggacaccagtggcgcgcttcgtgccgcattggcaaaactcagcggaaagtagaccctcatgtccgatgtgga

SEQ ID NO: 82 - protein, 206 aa, Corynebacterium glutamicum
MIASLRGTVINIGLSSAVIECNGVGYEVVTTPNTLSQLVRGEEALVLTTMVVREDAMKLYGFIDNESREMFSVLQTVSGLGPRLALACESVLSPLEISQAITNADAKTLQRVPGVGKRMADRLIVELKGKVAAFAAGVVDEGGEQISLPNANIASEVVVEQVSQALVGLGFSEKQSDDAVSFVLAADPSLDTSGALRAALAKLSGK

SEQ ID NO: 83 - DNA, 735 bp, Corynebacterium glutamicum
  CDS (101)..(712): RXN00172
ttaaacaagtacatagttttgtgttttctacttccctactgctgtaataatggaaagtagttttcatcacacaacacaaaactattaaaggtagtcttaaatgtttggtagtagttttaaggaacaaacaactaacccgagaagtcaacgagtttcttatttgcgtgtctctagcaccgatcagaatctggctcgacaacgtgaagctgttaaccattccggtcatattgatcgtgagttcacagatgagctttccggtggcgccaaatcacacagacctggcttggaagactgcattaattatcttcgcgaggatgatgttcttgtcgtcgcatccattgaccgacttgcacgctcgctggttgatttacgcgtcatcattgaccgcatcacagacaaaggcgcatcggtcatttttctcaaagagaatttgactttcgctgcaggccgcgatgatcctcgagcaaacctcatgctcggtattttgggcagtttcgcagaatttgaacgctcaattattcgcgagcgccaagcagaaggtattgccctggcaaaaaaggccggcaagtatgcaggtcgcccaaaagccctcgacaaggaacaaatacaagaagcaaaagatatgatcgctcaaggtgaaacaaaatctgctgtcgccaagcattttggtattaatcgctcgaccttgtacgaatatctcaaaaatcctgactagattgagaatcaactatgcga

SEQ ID NO: 84 - protein, 204 aa, Corynebacterium glutamicum
MFGSSFKEQTTNPRSQRVSYLRVSSTDQNLARQREAVNHSGHIDREFTDELSGGAKSHRPGLEDCINYLREDDVLVVASIDRLARSLVDLRVIIDRITDKGASVIFLKENLTFAAGRDDPRANLMLGILGSFAEFERSIIRERQAEGIALAKKAGKYAGRPKALDKEQIQEAKDMIAQGETKSAVAKHFGINRSTLYEYLKNPD

SEQ ID NO: 85 - DNA, 550 bp, Corynebacterium glutamicum
  CDS (101)..(550): FRXA00172
ttaaacaagtacatagttttgtgttttctacttccctactgctgtaataatggaaagtagttttcatcacacaacacaaaactattaaaggtagtcttaaatgtttggtagtagttttaaggaacaaacaactaacccgagaagtcaacgagtttcttatttgcgtgtctctagcaccgatcagaatctggctcgacaacgtgaagctgttaaccattccggtcatattgatcgtgagttcacagatgagctttccggtggcgccaaatcacacagacctggcttggaagactgcattaattatcttcgcgaggatgatgttcttgtcgtcgcatccattgaccgacttgcacgctcgctggttgatttacgcgtcatcattgaccgcatcacagacaaaggcgcatcggtcatttttctcaaagagaatttgactttcgctgcaggccgcgatgatcctcgagcaaacctcatgctcggtattttgggcagtttcgcagaatttgaacgctcaattattcgcgagcgccaagcagaaggtattgccctg

SEQ ID NO: 86 - protein, 150 aa, Corynebacterium glutamicum
MFGSSFKEQTTNPRSQRVSYLRVSSTDQNLARQREAVNHSGHIDREFTDELSGGAKSHRPGLEDCINYLREDDVLVVASIDRLARSLVDLRVIIDRITDKGASVIFLKENLTFAAGRDDPRANLMLGILGSFAEFERSIIRERQAEGIAL

SEQ ID NO: 87 - DNA, 1296 bp, Corynebacterium glutamicum
  CDS (101)..(1273): RXA00184
attttggtagccaaccaccctgataaccagcaagtgtatgaggaagaagacactgattaaccagggcttatggttgtggtctacccccgaataggaaaccatgtccaccgtgcatgatgagatgggcgttatgaatacaacagtgaagtttttacactcctcggacctacaaataggcatgacacggtggttcttatccgatgaagcccaggcccgttttgacgatgaccggattagggccatcgaaaagatgggcaagatcgcacggaaaaatcagtgcgagttcattgtgctcgccggcgacgtcttcgagcacaactctttagaacaacgcaccactggacgtgccttagaagccttacgatccttaaagctgccggtttatctgctgccgggtaaccatgatcctttaacagcggattcgttgttttaccgcgccaaagatattgatggcgtgacaatcttgtcggacaccaccgtgcatggggtggcccctggggtggaaattattggagcacccttgctgcacaagatggctacttcagatctagtggcagaagcattgaaagatttggaaccaacctccaacgtccgtatcgctgtggggcacggccaagcagaagctcgcaccactgaccaccgggctgacttaatcgatctgaacactgttgaagccaaattggctgacggtacgattgactacctcgctctcggcgatacccactcggctcagccagtaggtaccagtggaaaagtctggttttctggagctccagagaccacagacttccatgacttagatccagaccgtgtgggcggtgaggtgaactctggcaaagttctcattgtcagcgcctcaaagggtgacgtttcagtcgaagaagtcgaggtggggaagtggaccttccacgctttatctaaagaaatcacctcgggtaccgatgtggaagatttcttggataccttgcaggcataccctgataaatctcgaacagtcatcaaatatggtctccgcggaaccatcaccctggaacaaaacaggcgtttggaagaaggcatcgctgggttagaagatgtctttgcttcactcaagcctcgggaacgcaccactgacctcgtgctggagccaggggaggaagaattagccaatctcgatgccacaggttacgccgctgaagtattgcgagagctcgctgactctgtggtcaatggtgcagcgccggaagaagaccgcgatgcgctcaacctattgttccgactaagccgggaggtctaagacatgcgtattcatgaaat

SEQ ID NO: 88 - protein, 391 aa, Corynebacterium glutamicum
MSTVHDEMGVMNTTVKFLHSSDLQIGMTRWFLSDEAQARFDDDRIRAIEKMGKIARKNQCEFIVLAGDVFEHNSLEQRTTGRALEALRSLKLPVYLLPGNHDPLTADSLFYRAKDIDGVTILSDTTVHGVAPGVEIIGAPLLHKMATSDLVAEALKDLEPTSNVRIAVGHGQAEARTTDHRADLIDLNTVEAKLADGTIDYLALGDTHSAQPVGTSGKVWFSGAPETTDFHDLDPDRVGGEVNSGKVLIVSASKGDVSVEEVEVGKWTFHALSKEITSGTDVEDFLDTLQAYPDKSRTVIKYGLRGTITLEQNRRLEEGIAGLEDVFASLKPRERTTDLVLEPGEEELANLDATGYAAEVLRELADSVVNGAAPEEDRDALNLLFRLSREV

SEQ ID NO: 89 - DNA, 1983 bp, Corynebacterium glutamicum
  CDS (101)..(1960): RXA00019
accggataccttatgaaacacctggtgagcggtgtgtttcaccccaacaaccgagtaaaatatatctagtactattttacgattgaaagtagatttttctatgaccgttacctcaccagcagcgctcgcactcagcgacatgtcctatgtggacatcattaagaagaagcgcggatggacaaccgagtttttccacagcaccatcaacaccggtgaaaccaccacaccgctaccagacagcgaccgtgccacagcactaatccatgaccacatcaccaaggctcaagagataaccatcatcaccgactttgatatggacggtatttcagccggtgtcattgcctatgcaggtcttgccgaactgggcgcacaggtcaatatggtggtgcccgactatcgtggcgaacgaaatgtcacagccagcgatattgatcgtgcgctagagctctaccctgcaacctcactcatcatcacctgcgatgtcggcatcggctcccatgaaggtattgcccgtgctcacgaacgcagtatcgccgtcctggtcacagatcaccacatggaggtcgaaccctgccaggccgatgtggttcttaaccccaacagaattgactctgactaccccaacaaagatatttgcggtgcgcaggtcattttcgccacattgagtgactatgcacgtcgttatcgggcggacaagattatcgacattaatttgttggctgttttctcaggcattggtgcactcgccgatgtcatgcctctcacccgtgacactcgaccaacagtgaagcaggctattgcgttgcttcggcttgctatcccacaagtaagtaaaaaccgtttcggcggttgggatacctatgctgcacgctctgttaatcctgatacgtccacactcatgcatattgtcaatgccagccagcatgatcaccgcttcattgcagccttccaaggcatctcaattcttcttggtgaactgattgcgcaaaagaagctagtaaacatcgacaatatttctgagtcattcattggcttcactcttggtccgatgtttaacgctactcgtcgtgttggtggcgacatgcacgattcatttctcgtgtttgcgccccatgccgcactagcatcacagccgtcgatgaatccaaatcgacatgctgcgatctctcgcatcattgataacaacgaacgtcgcaaagagctctccaagtcctcttatgctgccgtacacagctcagatcagccctacgcgccctttgtgtggctctctgaggcaccaagcggcattcttggtctcattgcctcacagctcactcgtgagtctgacgtgcctgccattgtcattaatccagataccttgtccggttcagctcgctcacctgagtgggcaccgatcatcacccaagtaaacaccctcagcgcacaaggtcacggcggtattcatgctgcaggccatgagtacgcctgtggtatgcgttttgataaccatgatgacattgtgacctttgttgcaacactcgacgcactcgataaaaacacgccacgggaagcacagccggcagatctgcatttggttgacattgaccacgcgcgtcctgtgcttgataacccctcactcacccaagagctcagtacggtcgatgctgcagtggatgctgcacagttgcttgttctcattgatcagcttgatcaactgcagccatttggacatggttttacctatccgcgcatcgacgtgacgttcaggccggcagaaacagaattcaaggttatgggtcagcaccatcaacatctcaaggtgatcactcactcagggttgaccttattgtggtggaataaggctcagcagctcgatgagatcgcacagtctgaattagtcaccatgtctgtggagctcgatgtcaatatgttccgtgggtttatttccccgcaaggcattgtctctgcgtgcacagttatctagcttggttgcataagcaccaa

SEQ ID NO: 90 - protein, 620 aa, Corynebacterium glutamicum
MTVTSPAALALSDMSYVDIIKKKRGWTTEFFHSTINTGETTTPLPDSDRATALIHDHITKAQEITIITDFDMDGISAGVIAYAGLAELGAQVNMVVPDYRGERNVTASDIDRALELYPATSLIITCDVGIGSHEGIARAHERSIAVLVTDHHMEVEPCQADVVLNPNRIDSDYPNKDICGAQVIFATLSDYARRYRADKIIDINLLAVFSGIGALADVMPLTRDTRPTVKQAIALLRLAIPQVSKNRFGGWDTYAARSVNPDTSTLMHIVNASQHDHRFIAAFQGISILLGELIAQKKLVNIDNISESFIGFTLGPMFNATRRVGGDMHDSFLVFAPHAALASQPSMNPNRHAAISRIIDNNERRKELSKSSYAAVHSSDQPYAPFVWLSEAPSGILGLIASQLTRESDVPAIVINPDTLSGSARSPEWAPIITQVNTLSAQGHGGIHAAGHEYACGMRFDNHDDIVTFVATLDALDKNTPREAQPADLHLVDIDHARPVLDNPSLTQELSTVDAAVDAAQLLVLIDQLDQLQPFGHGFTYPRIDVTFRPAETEFKVMGQHHQHLKVITHSGLTLLWWNKAQQLDEIAQSELVTMSVELDVNMFRGFISPQGIVSACTVI

SEQ ID NO: 91 - DNA, 786 bp, Corynebacterium glutamicum
  CDS (101)..(763): RXA00929
cgcagaggatagcggggtgatcgcaattgtgtgctaaaaatgagtatggaatagcaactgcacagcgacgaatcagcgacgaatcagtgaggacacgaatatgaaccacgaagggcttcgggtaatgggcattgacccaggtcttacccgttgtggcttatctgtggttcaagcaggtcgtggtcgtaccgtgtatccagtgtcggtgggcgtggtgcgcaccccaccagatgcggagttggcggagcggttgcttcggctcagcaaagcagtgggtgagtggatggatgagtacaccccagatgtcattgctattgagcgtgtctttgagcgcggaaatgtttccaccgtgatgaacactgcgcatgcggtgggtgtgttgatcttggctgctgctgaacgcggattgccagttcacatgtacacccccagtgaggtgaaaaaggctatctccggtaatggtcgcgctgataagaaacagatgacggtcatgatcactcgaattctgggccttggtgagccacccaaacctgctgacgccgctgatgctttatcgttggcggtgtgtcactgctggcgggcgccaatgcttatgcgggcgcaatcgcagtactccgagcaagagttggaaaagcgacggcgtgtgcagcaaggaaaattgggtaaagcgaaatcaacttacaatgcggaacaagctcaatcccatgcatccgatcctgctaaagcggctcatcccagtcagtttcaacgaactgacaccaattagtttttaaaaagttctagtac

SEQ ID NO: 92 - protein, 221 aa, Corynebacterium glutamicum
MNHEGLRVMGIDPGLTRCGLSVVQAGRGRTVYPVSVGVVRTPPDAELAERLLRLSKAVGEWMDEYTPDVIAIERVFERGNVSTVMNTAHAVGVLILAAAERGLPVHMYTPSEVKKAISGNGRADKKQMTVMITRILGLGEPPKPADAADALSLAVCHCWRAPMLMRAQSQYSEQELEKRRRVQQGKLGKAKSTYNAEQAQSHASDPAKAAHPSQFQRTDTN

SEQ ID NO: 93 - DNA, 423 bp, Corynebacterium glutamicum
  CDS (101)..(400): RXA02251
atgtgggctttccagtcccgcgatggagaagatgtggtgcgcgcggttgcgaccttccgcgacctcgaaaacaagtacatgccagaggactaattaagctgtggctgatccaacaacttatcgcccggctccaggaacaattccaacggagccgggtgtttataaattcagggacgaaaaccgccgcgtgatctacgtgggcaaggccaaaaacttgcgttcgcggttgtcgaactatttccaggatgtcacccaactgcatccgcgcacccgccaaatggtgttcgcagcgtcgtctgtggagtggaccgtggtgtccagcgaagtcgaggcgctgcagctggaatacacctggattaaacgctttgatccgcggttcaaacgtaaaataccgcgacgataaaacctatcccatgctggcag

SEQ ID NO: 94 - protein, 100 aa, Corynebacterium glutamicum
VADPTTYRPAPGTIPTEPGVYKFRDENRRVIYVGKAKNLRSRLSNYFQDVTQLHPRTRQMVFAASSVEWTVVSSEVEALQLEYTWIKRFDPRFKRKIPRR

SEQ ID NO: 95 - DNA, 1947 bp, Corynebacterium glutamicum
  CDS (101)..(1924): RXA02252
cgcacccgccaaatggtgttcgcagcgtcgtctgtggagtggaccgtggtgtccagcgaagtcgaggcgctgcagctggaatacacctggattaaacgctttgatccgcggttcaaacgtaaaataccgcgacgataaaacctatcccatgctggcagtatccacaggggagaggttcccgcgcgcgttcttcttccgaggtccgcgccgcaaaggtgtgcgctatttcggaccgtattcccacgcgtgggcagtgcgggaaacccttgatcttctcacccgcgttttccccatgcgcacctgttcaaagggtgtgtttaaccgccacgaaagcctcggccggccgtgtttgttgggctatatcgataaatgtgcggccccgtgcgtgggccgcgtgagcgaagaggaacaccgcgaaatcgttgacggtttcacctctttcatggctggtcacaccgacaaagtcactcgcaaactcaacgccgacatgatggctgcggccgaggaactcgatttcgagcgcgcggcccgcctgcgcgatgatctggaagccattgacaaggtcatggaaaaacaggccgtcgtccttggcgatggcaccgacgccgacatcatcgcattcgccaccgatcagctagaagccgccgtgcaagtcttcaacatccgaggtggccgaatccgcggccagcgcggctgggttgtggaaaagcccggcgactacgccggattgcttgtcgacgctacgacccaacctgagggtgatgccccggaaacagatcccgcactgccatttttgatgcaagatttcctcgttcagttttatggcgacgccgtcgagcgtgctgaaactgaggctaaggaagatgctgcggtgatcgagcgacgtggcgtcgataagcattcttttgaagaggcagccccagtgacgcgcgcttcggtcgtgccccgtgaaatcctcgtgcaagttgcgcccaatgaagctgagcaaaccctgaaagtactggaggaattgcgcggtgctggcgttgatgcccgcgtgccacagcgcggtgacaagcgtgcgctcatggaaactgtggagcgcaacgccaaagagctgctgaaacaacacaagcttaagcgtgtcggtgatctcaccgcgcgttcagctgcactgcaggaattgcaggaagcgctggacatggagcaggctccgctgcgcatcgaatgtaccgatatttcccatattcagggcaccgatgtggtggcatccctggtggtttttgaagatggtttgcctcgaaaatcggactaccgacgctatcgagtcaaagaagccgcaggcgatggacattccaacgacgtggcatccattgcggaaatcaccaggcgccgcttcctgcgccacaaccaagacaaacttgctgttcccgaagccgaagagtttgacggctcgaccttcagcgatgaaaaagtcgaggaaatgagcaccgacgccaggcgttttgcataccctcctcagatttttatcgtcgatggtggtgccccgcaggtagctgcagcccaagaagtctttgatgaattaggcatcgttgacgtggtgctcattggcctagccaagcgcttggaagaaatctggctgcccggcgaccccgatcccgtcatcttgccgagaaactcccaagcactgtttttgctccagcaaatccgtgacgaagcccaccgctttgccatcacctaccaccgccagcaacgatccaagcgcatgcgtgtttccgagctagatagcatcaagggccttggccagagccgtcgcactgaactagtcaagcactttggatccgtggcaaaactgaaagaggcaagcgttgaggacatttcccaagtgaaaggcttcggcccgaaacttgcggaggctgtctatgaaggtcttcacgcgtcaaaataagtagatcgctaggatgtaac

SEQ ID NO: 96 - protein, 608 aa, Corynebacterium glutamicum
LIRGSNVKYRDDKTYPMLAVSTGERFPRAFFFRGPRRKGVRYFGPYSHAWAVRETLDLLTRVFPMRTCSKGVFNRHESLGRPCLLGYIDKCAAPCVGRVSEEEHREIVDGFTSFMAGHTDKVTRKLNADMMAAAEELDFERAARLRDDLEAIDKVMEKQAVVLGDGTDADIIAFATDQLEAAVQVFNIRGGRIRGQRGWVVEKPGDYAGLLVDATTQPEGDAPETDPALPFLMQDFLVQFYGDAVERAETEAKEDAAVIERRGVDKHSFEEAAPVTRASVVPREILVQVAPNEAEQTLKVLEELRGAGVDARVPQRGDKRALMETVERNAKELLKQHKLKRVGDLTARSAALQELQEALDMEQAPLRIECTDISHIQGTDVVASLVVFEDGLPRKSDYRRYRVKEAAGDGHSNDVASIAEITRRRFLRHNQDKLAVPEAEEFDGSTFSDEKVEEMSTDARRFAYPPQIFIVDGGAPQVAAAQEVFDELGIVDVVLIGLAKRLEEIWLPGDPDPVILPRNSQALFLLQQIRDEAHRFAITYHRQQRSKRMRVSELDSIKGLGQSRRTELVKHFGSVAKLKEASVEDISQVKGFGPKLAEAVYEGLHASK

SEQ ID NO: 97 - DNA, 2952 bp, Corynebacterium glutamicum
  CDS (101)..(2929): RXN02416
agcggaaacaccttgttcgatgctatgttcgaaggtgtattttttgaagcgacaaaaatcgattttgaagggcagttgagcattggctgatcgcctcgtagtgcgcggagcgcgtgaacataacctaaaaggcgtggatattgatttgccacgcgactcgatggtggtgttcaccggcctgtcaggttccggtaaatcatcactggcctttgacaccatctttgcggaaggccagcgccgttacgtggagtcgttgtccagttacgcccgcatgttcttggggcagatggacaagccggacgtggatttgattgatggattatccccagcggtctccattgaccaaaaatccaccaaccgcaaccctcggtccacagtcggtaccatcacggaagtctatgactacctgcgtcttctgtacgcccgcgctggtaccgcacactgcccagtgtgtgatgcccgcgtggagcgtcaaaccccccagcagatggtggaccaaatccttggcatggaggagggactgaagttccaaatccttgcgcctgtggtgcgtacccgtaaaggtgagttcgttgatcttttcgcagatcttgcatcccaaggttattcccgcgtgcgggttgatggggaagtgcaccagctctcggatcctccaaagctagaaaagcagatcaagcacgatattgatgttgtggttgaccgtctgcaggtaaaagccagccaaaagcagcgcctgacagactctatggaaaccgcacttcgcctggccgatggcgtggctgtgctggagttcgttggcctggaggaagatgatccgaataggcttcgtcgattctctgaaaagatgagctgccctaacggtcacgcgttgacggttgatgagctggagcctcgtgctttttccttcaactctccttatggcgcgtgtcctgcctgtgatggcttgggtgtgcgcaccgaagttgatattgatctgatcatcccagatccagatgcacctgcaactaaagcggttcagccctggaactccagcccaaaccactcttactttgaaaagctcattgaaggcctggcgaaagccctcggatttgatccggaaactccgtacagtgagctcaccgcagctcaaaagaaggctctggtctatggatcgaaggaagaagtaagcgttcgatacaagaaccgctacggacgcgtgcgttcttggactgcgccttttgaaggtgtcatgggctactttgatcgcaagttggagcagactgattccgaaacccaaaaagaccgactgttgggctacacccgtgaagtgccctgcccaacctgtaaaggcgcacgcctcaagccggaaatcttggccgttcgcctagactccggaagccatggagcgttgtccattgctggactaaccgcgctgtcggtgcatgaagcattcgagtttttggataacctcacactgggcaagcgcgaggaaatgatcgcgggagctgtgctgaaggaaattcacgcccgcctgaaattcctgcttgacgtgggcctttcctacctcacccttgatcgcgccgcaggcaccctgtctggtggtgaagcgcagcgtatccgcctggctactcaaattggttccggtctggctggtgtgctctacgtcttggatgagccatccattggtctgcaccaacgtgacaaccagcgcttgatcactacccttgagcatctccgagatatcggaaacacgctcattgttgtggaacacgatgaagacaccatcaggcgcgcagattggctcgtggatattggtcctcgagctggtgaatttggtggcgaagtggtctaccaaggtgagccgaagggcattttggactgcgaagaatccctcacaggtgcttacttgtctggtcgtcgaaccctgggtgttcctgatactcgccgtgagatcgacaaagagcgacagctcaaggtggttggtgctagggaaaataacctgcagggcatcgatgtgaaaatcccactgggtgtgctgtgctgcatcactggtgtgtcgggatctggtaaatccacgctggtcaatcagattttggccaaggttctggccaacaaactcaaccgcgcacgccaagtgcctggtcgcgcaaagcgggtggaaggcctcgagcacttggataagttggtccaagtggatcagtcgccaattggtcgtactccacgttcaaacccagcgacgtacacgggtgtgtttgataaagtccgtaacctttttgccgagaccactgaagcgaaggtccgcggttacaagcctggccgcttctccttcaatattaagggtggacgctgcgaagcatgtcagggcgatggcacgctgaagatcgaaatgaacttcctgcccgacgtgtatgttccgtgtgaagtctgtgatggtcagcgctacaaccgcgagaccctcgaggtgaagtacaagggcaaaaacatcgctgaagtattgggcatgccgatctctgaggctgcggacttctttgagcccatcacctcaattcaccgatacctagcaacgctggttgatgtcggccttggctatgtccgtttgggccaggcagcaacaaccttgtctggtggtgaagcccagcgtgtgaaacttgccgctgagctgcagaagcgttccaacggtcgcaccgtttacatcctcgatgagccaactactggtttgcactttgaagatattcgcaaactcatgatggtgatcgaaggcctggtggacaagggtaactccgtgatcatcatcgagcacaacctcgacgtgatcaaggctgccgactggatcgtggacatgggtccagagggcggaagcggcggtggaaccgtggtcgctgaaggaaccccagagcaagttgctgaagttgcgggttcctacaccggccaattccttaaagagttgttgtaggagaagatgaggggctttca

SEQ ID NO: 98 - protein, 943 aa, Corynebacterium glutamicum
VRGAREHNLKGVDIDLPRDSMVVFTGLSGSGKSSLAFDTIFAEGQRRYVESLSSYARMFLGQMDKPDVDLIDGLSPAVSIDQKSTNRNPRSTVGTITEVYDYLRLLYARAGTAHCPVCDARVERQTPQQMVDQILGMEEGLKFQILAPVVRTRKGEFVDLFADLASQGYSRVRVDGEVHQLSDPPKLEKQIKHDIDVVVDRLQVKASQKQRLTDSMETALRLADGVAVLEFVGLEEDDPNRLRRFSEKMSCPNGHALTVDELEPRAFSFNSPYGACPACDGLGVRTEVDIDLIIPDPDAPATKAVQPWNSSPNHSYFEKLIEGLAKALGFDPETPYSELTAAQKKALVYGSKEEVSVRYKNRYGRVRSWTAPFEGVMGYFDRKLEQTDSETQKDRLLGYTREVPCPTCKGARLKPEILAVRLDSGSHGALSIAGLTALSVHEAFEFLDNLTLGKREEMIAGAVLKEIHARLKFLLDVGLSYLTLDRAAGTLSGGEAQRIRLATQIGSGLAGVLYVLDEPSIGLHQRDNQRLITTLEHLRDIGNTLIVVEHDEDTIRRADWLVDIGPRAGEFGGEVVYQGEPKGILDCEESLTGAYLSGRRTLGVPDTRREIDKERQLKVVGARENNLQGIDVKIPLGVLCCITGVSGSGKSTLVNQILAKVLANKLNRARQVPGRAKRVEGLEHLDKLVQVDQSPIGRTPRSNPATYTGVFDKVRNLFAETTEAKVRGYKPGRFSFNIKGGRCEACQGDGTLKIEMNFLPDVYVPCEVCDGQRYNRETLEVKYKGKNIAEVLGMPISEAADFFEPITSIHRYLATLVDVGLGYVRLGQAATTLSGGEAQRVKLAAELQKRSNGRTVYILDEPTTGLHFEDIRKLMMVIEGLVDKGNSVIIIEHNLDVIKAADWIVDMGPEGGSGGGTVVAEGTPEQVAEVAGSYTGQFLKELL

SEQ ID NO: 99 - DNA, 2663 bp, Corynebacterium glutamicum
  CDS (1)..(2640): FRXA02416
gacaagccggacgtggatttgattgatggattatccccagcggtctccattgaccaaaaatccaccaaccgcaaccctcggtccacagtcggtaccatcacggaagtctatgactacctgcgtcttctgtacgcccgcgctggtaccgcacactgcccagtgtgtgatgcccgcgtggagcgtcaaaccccccagcagatggtggaccaaatccttggcatggaggagggactgaagttccaaatccttgcgcctgtggtgcgtacccgtaaaggtgagttcgttgatcttttcgcagatcttgcatcccaaggttattcccgcgtgcgggttgatggggaagtgcaccagctctcggatcctccaaagctagaaaagcagatcaagcacgatattgatgttgtggttgaccgtctgcaggtaaaagccagccaaaagcagcgcctgacagactctatggaaaccgcacttcgcctggccgatggcgtggctgtgctggagttcgttggcctggaggaagatgatccgaataggcttcgtcgattctctgaaaagatgagctgccctaacggtcacgcgttgacggttgatgagctggagcctcgtgctttttccttcaactctccttatggcgcgtgtcctgcctgtgatggcttgggtgtgcgcaccgaagttgatattgatctgatcatcccagatccagatgcacctgcaactaaagcggttcagccctggaactccagcccaaaccactcttactttgaaaagctcattgaaggcctggcgaaagccctcggatttgatccggaaactccgtacagtgagctcaccgcagctcaaaagaaggctctggtctatggatcgaaggaagaagtaagcgttcgatacaagaaccgctacggacgcgtgcgttcttggactgcgccttttgaaggtgtcatgggctactttgatcgcaagttggagcagactgattccgaaacccaaaaagaccgactgttgggctacacccgtgaagtgccctgcccaacctgtaaaggcgcacgcctcaagccggaaatcttggccgttcgcctagactccggaagccatggagcgttgtccattgctggactaaccgcgctgtcggtgcatgaagcattcgagtttttggataacctcacactgggcaagcgcgaggaaatgatcgcgggagctgtgctgaaggaaattcacgcccgcctgaaattcctgcttgacgtgggcctttcctacctcacccttgatcgcgccgcaggcaccctgtctggtggtgaagcgcagcgtatccgcctggctactcaaattggttccggtctggctggtgtgctctacgtcttggatgagccatccattggtctgcaccaacgtgacaaccagcgcttgatcactacccttgagcatctccgagatatcggaaacacgctcattgttgtggaacacgatgaagacaccatcaggcgcgcagattggctcgtggatattggtcctcgagctggtgaatttggtggcgaagtggtctaccaaggtgagccgaagggcattttggactgcgaagaatccctcacaggtgcttacttgtctggtcgtcgaaccctgggtgttcctgatactcgccgtgagatcgacaaagagcgacagctcaaggtggttggtgctagggaaaataacctgcagggcatcgatgtgaaaatcccactgggtgtgctgtgctgcatcactggtgtgtcgggatctggtaaatccacgctggtcaatcagattttggccaaggttctggccaacaaactcaaccgcgcacgccaagtgcctggtcgcgcaaagcgggtggaaggcctcgagcacttggataagttggtccaagtggatcagtcgccaattggtcgtactccacgttcaaacccagcgacgtacacgggtgtgtttgataaagtccgtaacctttttgccgagaccactgaagcgaaggtccgcggttacaagcctggccgcttctccttcaatattaagggtggacgctgcgaagcatgtcagggcgatggcacgctgaagatcgaaatgaacttcctgcccgacgtgtatgttccgtgtgaagtctgtgatggtcagcgctacaaccgcgagaccctcgaggtgaagtacaagggcaaaaacatcgctgaagtattgggcatgccgatctctgaggctgcggacttctttgagcccatcacctcaattcaccgatacctagcaacgctggttgatgtcggccttggctatgtccgtttgggccaggcagcaacaaccttgtctggtggtgaagcccagcgtgtgaaacttgccgctgagctgcagaagcgttccaacggtcgcaccgtttacatcctcgatgagccaactactggtttgcactttgaagatattcgcaaactcatgatggtgatcgaaggcctggtggacaagggtaactccgtgatcatcatcgagcacaacctcgacgtgatcaaggctgccgactggatcgtggacatgggtccagagggcggaagcggcggtggaaccgtggtcgctgaaggaaccccagagcaagttgctgaagttgcgggttcctacaccggccaattccttaaagagttgttgtaggagaagatgaggggctttca

SEQ ID NO: 100 - protein, 880 aa, Corynebacterium glutamicum
DKPDVDLIDGLSPAVSIDQKSTNRNPRSTVGTITEVYDYLRLLYARAGTAHCPVCDARVERQTPQQMVDQILGMEEGLKFQILAPVVRTRKGEFVDLFADLASQGYSRVRVDGEVHQLSDPPKLEKQIKHDIDVVVDRLQVKASQKQRLTDSMETALRLADGVAVLEFVGLEEDDPNRLRRFSEKMSCPNGHALTVDELEPRAFSFNSPYGACPACDGLGVRTEVDIDLIIPDPDAPATKAVQPWNSSPNHSYFEKLIEGLAKALGFDPETPYSELTAAQKKALVYGSKEEVSVRYKNRYGRVRSWTAPFEGVMGYFDRKLEQTDSETQKDRLLGYTREVPCPTCKGARLKPEILAVRLDSGSHGALSIAGLTALSVHEAFEFLDNLTLGKREEMIAGAVLKEIHARLKFLLDVGLSYLTLDRAAGTLSGGEAQRIRLATQIGSGLAGVLYVLDEPSIGLHQRDNQRLITTLEHLRDIGNTLIVVEHDEDTIRRADWLVDIGPRAGEFGGEVVYQGEPKGILDCEESLTGAYLSGRRTLGVPDTRREIDKERQLKVVGARENNLQGIDVKIPLGVLCCITGVSGSGKSTLVNQILAKVLANKLNRARQVPGRAKRVEGLEHLDKLVQVDQSPIGRTPRSNPATYTGVFDKVRNLFAETTEAKVRGYKPGRFSFNIKGGRCEACQGDGTLKIEMNFLPDVYVPCEVCDGQRYNRETLEVKYKGKNIAEVLGMPISEAADFFEPITSIHRYLATLVDVGLGYVRLGQAATTLSGGEAQRVKLAAELQKRSNGRTVYILDEPTTGLHFEDIRKLMMVIEGLVDKGNSVIIIEHNLDVIKAADWIVDMGPEGGSGGGTVVAEGTPEQVAEVAGSYTGQFLKELL

SEQ ID NO: 101 - DNA, 855 bp, Corynebacterium glutamicum
  CDS (101)..(832): RXA02563
aggtgaattttgaggatgcggaggctgttcgtgcggctcgggaatttgtggcagatccgcgaggtacggcggcgtttctgactgcggaggaggatcaccaatgatgccgtatatcaccgatattgcagcgcttgaacatgtgggtgtggctgctgcttggacagagaaggttcctgcttttcgggtgttgagagaaaagcgcatgctggactttcgtgcgccgatcaccgtcataaccggggaaaacggtgtgggtaagtcgacattgctggaggctatcgcgatcaatgcgggcttcgacacagcaggtggtgaacacaccggaaagttcaaaccttccgacaaccctttgcaaactgtggcaaaagcacacaagggaaaagagccgatgcgggggtatttcctgcgggcggaaactcatttcaacgtcgcgtctggatatcgcgatgaggctcccggctgggtgaaccttcatcacatgtcgcacggggagtcggtgatgcatattgtgcagaatgcttttgtgggcaaggggctgtatctgatggatgagcctgaagcggggctatcgttcattcgacagatggcgattctggcggagcttaattttctggcggaaagtggtgcgcaaattatcatcgtgacgcattcgccggtgttgatggctattccgggtgcagaaatttgggagtttagtgcatcgggggaactgcatcgagggtttgattttgaggtgacaacggcgtttcgagcgctacgtgacttctttgaggatccggaagaaattgctgagtacatgatggacgtcatgatggacaacaagggggagtcctagctcacaagtagttctcgaat

SEQ ID NO: 102 - protein, 244 aa, Corynebacterium glutamicum
MMPYITDIAALEHVGVAAAWTEKVPAFRVLREKRMLDFRAPITVITGENGVGKSTLLEAIAINAGFDTAGGEHTGKFKPSDNPLQTVAKAHKGKEPMRGYFLRAETHFNVASGYRDEAPGWVNLHHMSHGESVMHIVQNAFVGKGLYLMDEPEAGLSFIRQMAILAELNFLAESGAQIIIVTHSPVLMAIPGAEIWEFSASGELHRGFDFEVTTAFRALRDFFEDPEEIAEYMMDVMMDNKGES

SEQ ID NO: 103 - DNA, 2220 bp, Corynebacterium glutamicum
  CDS (101)..(2197): RXA02731
tttgcgctaaacgtaggggtcaagcgtcgaaaagcgcttgcttgcacgctgttttgctgcgggccgcaacgtgtccaccctgtggcgtatcctagaatgcatggcttttgctgctgaacatcctgtcctgtcccactctgagcaccgcccggttggtgaaatcgagcgtagcgatgacaaatttgttgtcgttagtgaatttgagcctgcgggtgaccagcctgcggctattaaagagctcgatgagcgcttggatcgcggtgagcgggacgtcgttttgatgggtgctactggtacgggtaagtccgcgactgcggcgtggttgatcgaaaagcagcagcgccccgctttggtgatggcgccgaataagacgctggctgcgcagttggctaatgaattgcggcagctgttgcccaataacgcggtggagtatttcgtgtcttattacgattactaccagccagaagcgtatatcgcgcagactgatacctatattgaaaaggactcctcgattaatgaggatgtggagcgtctgcgtcactcggcgacgtcgtctttgctgagtaggcgagacgtcgtggttgttagttcggtgtcgtgtatttatggcttgggcactccacagtcttatcttgaccgttccgttgtgttgaacgtgggggaggagatcgaccgcgatcgctttttgcgcctattggtagatattcaatacgaacgcaatgatgtgggctttactcgtggtgctttccgcgtgaagggcgataccgtggacatcatcccggcctatgaggaattggcggtgcgcattgagtttttcggtgatgaaattgatgcgttgtactacatccatcccctgactggtgacaccatccggcaggtgaatgagatccgtattttcccagctacgcactatgttgcgggacctgagcggatggaaaaggcagtcgctgatattaaggcggagttggaagtgcgcctggctgatttggagaaccgtggcaagttattggaagcgcagcgtcttaggatgcgtactgaatatgacttagaaatgatcgagcaggttggtttctgttcgggcattgagaactattctcgccacattgatggacgtggggagggaaccgcaccggccacgctgattgactatttcccagaggatttcctcaccatcatcgatgagtctcacgtgacagtcccgcagatcggcggcatgtttgagggcgatatgtcccgtaaacgtaacctcgtagaattcggtttccgcctgccatccgcgatggataaccgcccattgacctgggaggagttcgatgaacgccgtggccaaacggtgttcatgtctgcaactccaggcaagtttgagatcgctgctgctgatggtgagtttgtggagcaggtcattcgcccaacaggtctggtggatccaaaggtcaccgtcaagccaacgaaggggcagattgatgatctgatccatgaaattcgccaacgcaccgataaagatgagcgcgttttggtcaccacattgaccaagaaaatggctgaggatcttactgattacctgctggaaaacggcatccgcgtgcgctacctgcactcagatattgataccttgcagcgtgtggaattgctgcgtcagcttcgcctgggcgaatacgatgtgttggtaggtattaacctgctgcgtgagggccttgacctgccagaagtctctctggttgcgattctcgacgccgacaaggaaggcttcctgcgctccaccacctcactgattcagaccattggccgcgccgcccgaaatgtgtccggcgaggtcatcatgtacgccgacaagatcactgattcgatgcagtatgccatcgaggaaaccgatcgacgccgtgaaaagcaggtcgcttataacaaggaacacggcatcgatccgcagccgcttcgaaagaaaatcgcggacatcctcgaccaggtctatgacaattccgctgatggagcaggaccttctgcctctggcgatgcggcagtcgtggctaaacctgacgtgtctagcatgcccgccaaagaagtgcaaaagcttatcgacgacctcagcgctcagatggctgcggccgcgcgggagctcaagttcgagctggcagggcgtctgcgagatgagatcttcgagctcaagaaggaactgagaggtatcaaggatgccggcatctaagtcagcttgctcacttaaag

SEQ ID NO: 104 - protein, 699 aa, Corynebacterium glutamicum
MAFAAEHPVLSHSEHRPVGEIERSDDKFVVVSEFEPAGDQPAAIKELDERLDRGERDVVLMGATGTGKSATAAWLIEKQQRPALVMAPNKTLAAQLANELRQLLPNNAVEYFVSYYDYYQPEAYIAQTDTYIEKDSSINEDVERLRHSATSSLLSRRDVVVVSSVSCIYGLGTPQSYLDRSVVLNVGEEIDRDRFLRLLVDIQYERNDVGFTRGAFRVKGDTVDIIPAYEELAVRIEFFGDEIDALYYIHPLTGDTIRQVNEIRIFPATHYVAGPERMEKAVADIKAELEVRLADLENRGKLLEAQRLRMRTEYDLEMIEQVGFCSGIENYSRHIDGRGEGTAPATLIDYFPEDFLTIIDESHVTVPQIGGMFEGDMSRKRNLVEFGFRLPSAMDNRPLTWEEFDERRGQTVFMSATPGKFEIAAADGEFVEQVIRPTGLVDPKVTVKPTKGQIDDLIHEIRQRTDKDERVLVTTLTKKMAEDLTDYLLENGIRVRYLHSDIDTLQRVELLRQLRLGEYDVLVGINLLREGLDLPEVSLVAILDADKEGFLRSTTSLIQTIGRAARNVSGEVIMYADKITDSMQYAIEETDRRREKQVAYNKEHGIDPQPLRKKIADILDQVYDNSADGAGPSASGDAAVVAKPDVSSMPAKEVQKLIDDLSAQMAAAARELKFELAGRLRDEIFELKKELRGIKDAGI

SEQ ID NO: 105 - DNA, 585 bp, Corynebacterium glutamicum
  CDS (101)..(562): RXA00998
aatcggcctaaaaggtgtgaccatttgggggtagtggcgattttaccaggtcacaggaggtgaaaatccaaccattttaggccgactagagtaattaattatgacttcccgcgatgatcaaccccaagatctgctttcgcttgcagaacttgccgccaccagagctttaaccacagacgaacttgaagcactcaacaacgccaattatggcctcgaccgcaatctggggctgcgctacaccaccatcgagcccggccgggtggtcagcgaacttcacgtggcatccaagcacctgcaagtggtgggcttggtcaacggtggtgtctacgccgccatcgccgaatccactggatcagtcgccagcatgatttccgcccctggaaaaatggtcgtcggcatcaacaacaacaccgacttcatttctgctgtgagctccggtgtcatcgtggccgaagcaacgccgattcagctaggtggccgcacccatctgtggcagatcgaatgcacccaccgcggagaagtcgtcgcacgaaccacactgcgcaccatggtgctgaacaagtagccctatactcgggcaccatg

SEQ ID NO: 106 - protein, 154 aa, Corynebacterium glutamicum
MTSRDDQPQDLLSLAELAATRALTTDELEALNNANYGLDRNLGLRYTTIEPGRVVSELHVASKHLQVVGLVNGGVYAAIAESTGSVASMISAPGKMVVGINNNTDFISAVSSGVIVAEATPIQLGGRTHLWQIECTHRGEVVARTTLRTMVLNK

SEQ ID NO: 107 - DNA, 582 bp, Corynebacterium glutamicum
  CDS (101)..(559): RXN02386
cagatttccatcaagcatgcgttgatcgtgtgcatggatctcgttgtggctttttgtcggttggtttttcacccgtgagaaacccgtgaatccacccaccatggcggcgttggcggaaaactatcaaacaccggcgccgagttcgcaggtggtggtgtctgtggtggggcacgtggctaaacccggcctggtcacgctcgctgagggctcgcgggtggctgatgccctggccattgcaggtgccttgccagacgccgatctgacggcgctcaacttggcgcaattgcttgtcgacggcacccagatccatgttttagctatcggcgaggtacaacctatttcggttgatgctgctgcgacttctgcttctgggttgatttccttgaataccgccactgttgctgatttggtgacgctgcctggggtgggggagaagacagcgcaggcgatcattgactttcgggagagcaacggtgggtttagcaccgtggaggatttactgcaggtcaaggggattgggccctcaaagtttgagcagatctctggattggtgtccccatgattgaggtgcgtttggttccc

SEQ ID NO: 108 - protein, 153 aa, Corynebacterium glutamicum
MAALAENYQTPAPSSQVVVSVVGHVAKPGLVTLAEGSRVADALAIAGALPDADLTALNLAQLLVDGTQIHVLAIGEVQPISVDAAATSASGLISLNTATVADLVTLPGVGEKTAQAIIDFRESNGGFSTVEDLLQVKGIGPSKFEQISGLVSP

SEQ ID NO: 109 - DNA, 528 bp, Corynebacterium glutamicum
  CDS (101)..(505): FRXA02386
tgtcggttggtttttcacccgtgagaaacccgtgaatccacccaccatggcggcgttggcggaaaactatcaaacaccggcgccgagttcgcaggtggtggtgtctgtggtggggcacgtggctaaacccggcctggtcacgctcgctgagggctcgcgggtggctgatgccctggccattgcaggtgccttgccagacgccgatctgacggcgctcaacttggcgcaattgcttgtcgacggcacccagatccatgttttagctatcggcgaggtacaacctatttcggttgatgctgctgcgacttctgcttctgggttgatttccttgaataccgccactgttgctgatttggtgacgctgcctggggtgggggagaagacagcgcaggcgatcattgactttcgggagagcaacggtgggtttagcaccgtggaggatttactgcaggtcaaggggattgggccctcaaagtttgagcagatctctggattggtgtccccatgattgaggtgcgtttggttccc

SEQ ID NO: 110 - protein, 135 aa, Corynebacterium glutamicum
VSVVGHVAKPGLVTLAEGSRVADALAIAGALPDADLTALNLAQLLVDGTQIHVLAIGEVQPISVDAAATSASGLISLNTATVADLVTLPGVGEKTAQAIIDFRESNGGFSTVEDLLQVKGIGPSKFEQISGLVSP

SEQ ID NO: 111 - DNA, 1785 bp, Corynebacterium glutamicum
  CDS (101)..(1762): RXN02388
ttcgggagagcaacggtgggtttagcaccgtggaggatttactgcaggtcaaggggattgggccctcaaagtttgagcagatctctggattggtgtccccatgattgaggtgcgtttggttcccgtggcggctgtgatgtggatggctgtcgctgcgttgattatcaatggttcgtgggtgttgtcggtggggattgttggcatcgcgatcattgctgcttgtgtgtttaaacactggggtcaagctgtggtgatagctgcactgggcgttggtgccgtagtgatggctgcgttgagaatcagcagcgcgaaggcatttgaagcaccgcaaacctgggtgggtaccgcagaaaccatcaagtttttagacagcggtgatcaactaatcggtttgagagtagaaggctatccagcgccgattccagtgttttactctggtagcgacaccattgagaaagcctctctcattgcagtgtccggtcggattaaaccagatagtttccctggggtgggtgatctgaccatttccactgaagacattgatcagttggaaccgaccactggttatagcgcatgggtgaaccaggtgcgtgacgggttttcccaagccgtggaagaaaccgtgggggagtcttcccgtggactgattccaggcatggtgttgggggatacgcggttgcaggggtcaattgaagcccaaacctatattgatacggggttgtctcacctgtcagctgttagtggaagcaatgtagccattgtggtgtcctctgtggtggtgttgtcgtattttctcaccgctgggccacgcatcagggtggtggcgtcattgctgtccttagttatttttgtctccctcgtggggtttgaaccaagtgtgcttcgtgcttcggtcacaggcatcgtggggcttctggcaatcatcaactcttctcggatggagccgatgcatgggttgagtctttcggtgatttgcttactgttttatgattccaacctggcggtgcattacggattcttactctcgtgtgcagcaactgctggcattgtgatgcttcaaccactgctgtaccgtgccatcggtccaccactggcggtgtggaaagtaccagacatcgtggtgcgcgctttcgcggtgtccattgccgctgatctggtgaccatcccgattatcgctctgatggctcgccaaatatccctcgtggcagtgctggccaacgtgttggttgaattagctgttccacccatcacgttgcttgggttgattgccgtgctggcaagccttcttccctggccagtggaatacccactcttgaaaatcattgagcccttcacctggtggattcatcacgtggccaagtggtgccaacaattacccaattcgacgctggaaataagtgctggttgggcagggattgcctgggcgtgtatggcagcggtgtgggtggtggtgattatctacaaaggatatgtgcgcacccttgcagtgtgttgtgtctgcttctttcttttcggcgcgtggaataacagactgccagcccaaatagatccgacagagctgcggtttgtcatcatcgccgatgattctgagctcactgatgtgcccgaacatgcagaattgatcatcgtggaagacccccacggcagcatgtccgatcgccccatcgtcaccagagaaggaatccctgtgctgtatccataccgcgatggggaggtcagccttcatattgatggcacccagcatgcagcggacgggagattttaacgacacttgtggcacgatgg

SEQ ID NO: 112 - protein, 554 aa, Corynebacterium glutamicum
MIEVRLVPVAAVMWMAVAALIINGSWVLSVGIVGIAIIAACVFKHWGQAVVIAALGVGAVVMAALRISSAKAFEAPQTWVGTAETIKFLDSGDQLIGLRVEGYPAPIPVFYSGSDTIEKASLIAVSGRIKPDSFPGVGDLTISTEDIDQLEPTTGYSAWVNQVRDGFSQAVEETVGESSRGLIPGMVLGDTRLQGSIEAQTYIDTGLSHLSAVSGSNVAIVVSSVVVLSYFLTAGPRIRVVASLLSLVIFVSLVGFEPSVLRASVTGIVGLLAIINSSRMEPMHGLSLSVICLLFYDSNLAVHYGFLLSCAATAGIVMLQPLLYRAIGPPLAVWKVPDIVVRAFAVSIAADLVTIPIIALMARQISLVAVLANVLVELAVPPITLLGLIAVLASLLPWPVEYPLLKIIEPFTWWIHHVAKWCQQLPNSTLEISAGWAGIAWACMAAVWVVVIIYKGYVRTLAVCCVCFFLFGAWNNRLPAQIDPTELRFVIIADDSELTDVPEHAELIIVEDPHGSMSDRPIVTREGIPVLYPYRDGEVSLHIDGTQHAADGRF

SEQ ID NO: 113 - DNA, 871 bp, Corynebacterium glutamicum
  CDS (101)..(871): FRXA02385
ttcgggagagcaacggtgggtttagcaccgtggaggatttactgcaggtcaaggggattgggccctcaaagtttgagcagatctctggattggtgtccccatgattgaggtgcgtttggttcccgtggcggctgtgatgtggatggctgtcgctgcgttgattatcaatggttcgtgggtgttgtcggtggggattgttggcatcgcgatcattgctgcttgtgtgtttaaacactggggtcaagctgtggtgatagctgcactgggcgttggtgccgtagtgatggctgcgttgagaatcagcagcgcgaaggcatttgaagcaccgcaaacctgggtgggtaccgcagaaaccatcaagtttttagacagcggtgatcaactaatcggtttgagagtagaaggctatccagcgccgattccagtgttttactctggtagcgacaccattgagaaagcctctctcattgcagtgtccggtcggattaaaccagatagtttccctggggtgggtgatctgaccatttccactgaagacattgatcagttggaaccgaccactggttatagcgcatgggtgaaccaggtgcgtgacgggttttcccaagccgtggaagaaaccgtgggggagtcttcccgtggactgattccaggcatggtgttgggggatacgcggttgcaggggtcaattgaagcccaaacctatattgatacggggttgtctcacctgtcagctgttagtggaagcaatgtagccattgtggtgtcctctgtggtggtgttgtcgtattttctcaccgctgggccacgcatcagggtggtggcgtcattgctgtccttaggtatttttgtctccctcgtggggtttgaa

SEQ ID NO: 114 - protein, 257 aa, Corynebacterium glutamicum
MIEVRLVPVAAVMWMAVAALIINGSWVLSVGIVGIAIIAACVFKHWGQAVVIAALGVGAVVMAALRISSAKAFEAPQTWVGTAETIKFLDSGDQLIGLRVEGYPAPIPVFYSGSDTIEKASLIAVSGRIKPDSFPGVGDLTISTEDIDQLEPTTGYSAWVNQVRDGFSQAVEETVGESSRGLIPGMVLGDTRLQGSIEAQTYIDTGLSHLSAVSGSNVAIVVSSVVVLSYFLTAGPRIRVVASLLSLGIFVSLVGFE

SEQ ID NO: 115 - DNA, 869 bp, Corynebacterium glutamicum
  CDS (1)..(846): FRXA02388
gcaatcatcaactcttctcggatggagccgatgcatgggttgagtctttcggtgatttgcttactgttttatgattccaacctggcggtgcattacggattcttactctcgtgtgcagcaactgctggcattgtgatgcttcaaccactgctgtaccgtgccatcggtccaccactggcggtgtggaaagtaccagacatcgtggtgcgcgctttcgcggtgtccattgccgctgatctggtgaccatcccgattatcgctctgatggctcgccaaatatccctcgtggcagtgctggccaacgtgttggttgaattagctgttccacccatcacgttgcttgggttgattgccgtgctggcaagccttcttccctggccagtggaatacccactcttgaaaatcattgagcccttcacctggtggattcatcacgtggccaagtggtgccaacaattacccaattcgacgctggaaataagtgctggttgggcagggattgcctgggcgtgtatggcagcggtgtgggtggtggtgattatctacaaaggatatgtgcgcacccttgcagtgtgttgtgtctgcttctttcttttcggcgcgtggaataacagactgccagcccaaatagatccgacagagctgcggtttgtcatcatcgccgatgattctgagctcactgatgtgcccgaacatgcagaattgatcatcgtggaagacccccacggcagcatgtccgatcgccccatcgtcaccagagaaggaatccctgtgctgtatccataccgcgatggggaggtcagccttcatattgatggcacccagcatgcagcggacgggagattttaacgacacttgtggcacgatgg

SEQ ID NO: 116 - protein, 282 aa, Corynebacterium glutamicum
AIINSSRMEPMHGLSLSVICLLFYDSNLAVHYGFLLSCAATAGIVMLQPLLYRAIGPPLAVWKVPDIVVRAFAVSIAADLVTIPIIALMARQISLVAVLANVLVELAVPPITLLGLIAVLASLLPWPVEYPLLKIIEPFTWWIHHVAKWCQQLPNSTLEISAGWAGIAWACMAAVWVVVIIYKGYVRTLAVCCVCFFLFGAWNNRLPAQIDPTELRFVIIADDSELTDVPEHAELIIVEDPHGSMSDRPIVTREGIPVLYPYRDGEVSLHIDGTQHAADGRF

SEQ ID NO: 117 - DNA, 2019 bp, Corynebacterium glutamicum
  CDS (101)..(1996): RXA01975
agaacacatatgaccatgcgctatcacccagatttcgatgtgtggtcattcgatctcagccaaaccccgaagccttcgacacagattgggcaggattaatttgtcacaccacactcacctcaataactacatcacgagcttgagtgataacgctgatctccgtgaaaaagtcaccgcaaccgtagacgctttccgccataccgtcatggatgacttcgactacatcagtgatcaacaagtcctgctttatggcgatgtccaaagcggtaaaacctcacacatgctgggaattatcgcagattgcctcgacagtacgtttcacaccattgttattctgacctcgcctaacacacggctcgtgcaacaaacatacgaccgtgttgcccaagcatttccagatactttggtgtgcgaccgtgacggatacaatgatttccgtgcgaatcaaaagagcctcaccccgcgaaaatctatcgtagtcgtcggaaaaatacctgcagttcttggtaattggttacgcgtctttaacgacagtggcgcactttctggacaccctgtactcattattgatgacgaagcagatgcgacaagtctcaacaccaaagtaaatcagtctgatgtttcgaccattaaccaccagctcactagcataagagaccttgccacaggatgcatctaccttcaggtcacaggtacacctcaagcggtgcttcttcaaagcgacgatagcaactgggcagcggaacatgtgcttcacttcgcacctggtgagagctacatcggtggtcaacttttcttttctgagctcaacaacccttatctacgacttttcgctaatacccaatttgacgaggattctcgcttcagcgacgccatttacacctatctcttaaccgcagcactgttcaaacttcgcggtgaaagcttgtgtaccatgctcattcaccccagccacactgcatccagtcatagagacttcgcgcaagaagcccgcctccaactcactttcgccttcgagcgattctatgaaccaatgattcagcacaatttccaacgtgcttatgaacagctcgcacaaactgacagcaacctgccacccttgagaaaaattcttaacattcttggtggcatggaagatgacttctccatccacatcgtcaatagcgacaacccgactgttgaggaagattgggctgatggttataacattattgtcggtggcaactcgcttgggcgcggtttaacattcaacaacttgcaaaccgttttctacgtgcgcgaatccaagcgaccacaagcagacaccctgtggcagcacgcccgcatgtttggctacaaacgccacaaagacaccatgcgtgtgttcatgccggccactattgctcaaaccttccaagaggtctatctcggcaacgaagctattaaaaatcagctcgatcatggcacgcatatcaacgacattcgggtcattttaggtgatggcgtcgcacctactcgtgccaatgttctcgacaaacgcaaagttggaaacctcagcggtggcgtcaactactttgccgctgatcctagaatcaagaatgtcgaagcactcgacaaaaaactcttggcctacttagacaagcacggtgaggactccaccatcggtatgcgcgcgataatcaccattctcaacgcctttactgtagaccccaacgatctcgacctcgcgaccttcaaggctgcgctccttgactttgaacgcaaccaacctcatctcacagcacgtatggtgctgcgaacaaaccgcaaagtcaatcagggtacaggcgccctgctctcccctactgatcaagctctcagccgtgcagaagtcgcacacccattattgatcctataccgcattgaaggtgttaacgatgctgctgcgcaacgaggtgaacctacgtggtcaagcgaccctatctgggtgcctaatattaaactccctggtcaacgtcaattctggtgcgtagacggctaaacctcgccaccaccaaaaaa

SEQ ID NO: 118 - protein, 632 aa, Corynebacterium glutamicum
LSHHTHLNNYITSLSDNADLREKVTATVDAFRHTVMDDFDYISDQQVLLYGDVQSGKTSHMLGIIADCLDSTFHTIVILTSPNTRLVQQTYDRVAQAFPDTLVCDRDGYNDFRANQKSLTPRKSIVVVGKIPAVLGNWLRVFNDSGALSGHPVLIIDDEADATSLNTKVNQSDVSTINHQLTSIRDLATGCIYLQVTGTPQAVLLQSDDSNWAAEHVLHFAPGESYIGGQLFFSELNNPYLRLFANTQFDEDSRFSDAIYTYLLTAALFKLRGESLCTMLIHPSHTASSHRDFAQEARLQLTFAFERFYEPMIQHNFQRAYEQLAQTDSNLPPLRKILNILGGMEDDFSIHIVNSDNPTVEEDWADGYNIIVGGNSLGRGLTFNNLQTVFYVRESKRPQADTLWQHARMFGYKRHKDTMRVFMPATIAQTFQEVYLGNEAIKNQLDHGTHINDIRVILGDGVAPTRANVLDKRKVGNLSGGVNYFAADPRIKNVEALDKKLLAYLDKHGEDSTIGMRAIITILNAFTVDPNDLDLATFKAALLDFERNQPHLTARMVLRTNRKVNQGTGALLSPTDQALSRAEVAHPLLILYRIEGVNDAAAQRGEPTWSSDPIWVPNIKLPGQRQFWCVDG

SEQ ID NO: 119 - DNA, 963 bp, Corynebacterium glutamicum
  CDS (101)..(940): RXA01954
gtgaccaacggctgtggcggacaactcggatcgagtgcgtcgacgggcagcgtgtggctcatctcgcggagctcgacgtcgaagaacccgagactcggcagtgcttgccgacgacgtggtggtcgtcgcggagttccgggatcgcatctaccccggcctggtggagacaggcagggttgagcggggcggcgacaagccgttccacacggtcgtcaacgctgagaactaccacgcgctggagatgctgacctatacgcaccggcattccatcgacgccatctacatcgacccgccgtacaacaccggggcgagggactggaagtacgacaacgattacgtcgcgagtgatgacgactatcgacactcgaaatggctggcgttcatggagcgacggttgaagatctgtcgggagctcatgcgtagcgatgctactcttgtggcacctatcgatgagcatgaagtaaaccgtttgggcgtgttgctagatcagctcttcccggaatctacgcggcaactcgtcacaattgtcaacaaccctaaaggcgttactcagggatatctttcgagggtcgaagagtatgcgttctttgtatttggtcctgacgcgcgaatcggttcggtcgatgacgaccttctgacgcatcgagacatggccgatgctgaaggggaactgcagaggcctcgatggaaggggctcttgcggtcgggcgacgactcgcttcgagctgaccgtaaagatatgttctatccggtgtggttcgatgagtcgactgggcgactcagccacgcgggcgaagcattgccacttgacgaaactcctgacttcagtccgcaggatggcctgacgccgatctggcctattaggcgggacatgaaggaggggcctacccgggcagcgccacgccgttcgatccttgactacgcgctacaccctcatctgtgaagagccaccaaacctgggac

SEQ ID NO: 120 - protein, 280 aa, Corynebacterium glutamicum
VLADDVVVVAEFRDRIYPGLVETGRVERGGDKPFHTVVNAENYHALEMLTYTHRHSIDAIYIDPPYNTGARDWKYDNDYVASDDDYRHSKWLAFMERRLKICRELMRSDATLVAPIDEHEVNRLGVLLDQLFPESTRQLVTIVNNPKGVTQGYLSRVEEYAFFVFGPDARIGSVDDDLLTHRDMADAEGELQRPRWKGLLRSGDDSLRADRKDMFYPVWFDESTGRLSHAGEALPLDETPDFSPQDGLTPIWPIRRDMKEGPTRAAPRRSILDYALHPHL

SEQ ID NO: 121 - DNA, 441 bp, Corynebacterium glutamicum
  CDS (101)..(418): RXA02236
gcaggctgacatccttggtattaaccaggtgtaccctcgatttctggatactttggtattccttttgtcactaaaaaccacacgataacggaggaaccccgtggcccttccacagttgactgatgagcagcgcaaggcagcgcttgctaaggcagcagaggcacgcaaggcacgcgcagagctcaaagagaacctgaagcgcggcaacactaacctcagggaagttctggacaaggctgagtctgacgagatcatcggcaagaccaaggtctccgctctcctcgaggctctccctaaggttggcaaggtcaaggcaaaggagattatggacgagctgggcattgctcagacccgtcgtcttcgtggactgggtgaccgtcagcgtcgcgcacttctcgagcgtttcggcttcgaggattaattcttcagtgtcgggcgata

SEQ ID NO: 122 - protein, 106 aa, Corynebacterium glutamicum
VALPQLTDEQRKAALAKAAEARKARAELKENLKRGNTNLREVLDKAESDEIIGKTKVSALLEALPKVGKVKAKEIMDELGIAQTRRLRGLGDRQRRALLERFGFED

SEQ ID NO: 123 - DNA, 720 bp, Corynebacterium glutamicum
  CDS (101)..(697): RXN01795
agaccatattgaagacctcgaagctgttgagcctggctacatcgtcaagcctcgcctgtacaacttcgctgaatacggtgtcccacaattccgcgaacgtgtgctcattgttggcattcgccgtgacaccggctttgatttcaagcacccagctcctacccatggccctcgcggtgacatgccgtataagactgccggcgaagcgctcaaaggcgtgaaggatgtccccacaaacaacaaccacatgaagatcatgcctcgcaccgttgaagtgcttaagcgcatccctgagggcgaaaacttcaccgcgatccccaaagatgacccctactacgtcaagggcatgattagtcacgtttaccgtcgcttgcaccgtgatgagccatccaaaacccttatcgccggtggcggcgggggtacatggggataccattatgaaaaaaatcgagcattgaccaaccgcgagcgggctagaattcaatcgttccccgatgactttgagtttttgggatcaaacaccgaagtccgccgccaaatcggtaatgctgttcctcctgtaggtatgcacgctgtgggtgagcgactgatgaacctgtacaccgggaattacactcccgtcgatctagaggaacagcacgcgtacctgcagacgctctccattaaggaacgtctcgcgctggctgatcaggaagctgattaagtagatatatgaagcccacc

SEQ ID NO: 124 - protein, 199 aa, Corynebacterium glutamicum
VLIVGIRRDTGFDFKHPAPTHGPRGDMPYKTAGEALKGVKDVPTNNNHMKIMPRTVEVLKRIPEGENFTAIPKDDPYYVKGMISHVYRRLHRDEPSKTLIAGGGGGTWGYHYEKNRALTNRERARIQSFPDDFEFLGSNTEVRRQIGNAVPPVGMHAVGERLMNLYTGNYTPVDLEEQHAYLQTLSIKERLALADQEAD

SEQ ID NO: 125 - DNA, 996 bp, Corynebacterium glutamicum
  CDS (101)..(973): RXN02267
tgcgctcggcaagtgttttgcttatcgacgtctccccacataacaatcccaactcgaagcaccaacgattcaagccttatcagttttgtacaggaaaatagtgcaaaaatggggtttaagcttcgtggagaggattgtcatcgtgaacaacgtgcaacagtttcatcgattttttgatgattccgcagtctattatccctgcttcgtcccgcttgaccgagccatcggcgaacactttgatcgtcagaacaaaccgatgtccagattcatcggaacgctcattctgccgttagccaaactggaagaagccgcccaatacaccggcgatgaagtccttcgcgtgtcggcagtaatcagtactgatgggctcgctgatctgcgaagggatttttacgaactccccaacatcgacatcgcctcggtggaaatcaagctggtcggcgcagccctcaccaacaccgcttggttgggagatgtggaaaaactcatccaacaacatcgcaacactttcgtatgggttgagattccgacagccctggtcaccgcagatattgtccgaaaactccgccacatgggagctggcctgaaatacagaactggaggtgatagggaagagctcttcccctcaccgcaggacttggtcactgtgctgcgcaccgccatcgatgctgcattgccgtttaaactcactgcaggcctgcatcgtgctctcaggtatcgtgacgagaaaaccggccgacttcacttcggattcctcaacattgcagccgccgtggcgacacttcgtgctggaaaaggcgaggcagaggcactgaagatccttgaaggcgatgatgccgctccgcttattcacgcactacaaagcggcgaaaactggcgggattccttccgcagcttcagtacctgcaatgttgttgaaccactcaacactctgattgatcttgatgtgttggcggaaggagacgtacatccctaaggatcgacgctagttagatc

SEQ ID NO: 126 - protein, 291 aa, Corynebacterium glutamicum
VQKWGLSFVERIVIVNNVQQFHRFFDDSAVYYPCFVPLDRAIGEHFDRQNKPMSRFIGTLILPLAKLEEAAQYTGDEVLRVSAVISTDGLADLRRDFYELPNIDIASVEIKLVGAALTNTAWLGDVEKLIQQHRNTFVWVEIPTALVTADIVRKLRHMGAGLKYRTGGDREELFPSPQDLVTVLRTAIDAALPFKLTAGLHRALRYRDEKTGRLHFGFLNIAAAVATLRAGKGEAEALKILEGDDAAPLIHALQSGENWRDSFRSFSTCNVVEPLNTLIDLDVLAEGDVHP

SEQ ID NO: 127 - DNA, 729 bp, Corynebacterium glutamicum
  CDS (101)..(706): RXN02988
agcggcaaatatgtgcggcttggcataaactgtgtccatcggtacctgtgtaatagacacacggtaaacacgcacaagataaaacattgcgagatttttcatgagtacaaaacccactattgtgtccacattttctggttgcggtggcctcgatcttggcctccaagaggtcggattcgaccccatttgggccaacgacttctcagaagaagcagtccaaacctataagcacaacatcggtgaccacattgttcacggcgacatcactgaaattgatccgtttactgatgacaccatccctgacggcgatctcgtcaccggcggcttcccgtgccaggacttctccatgatctggaagcgtcctggactcgacggcaagcgtggcaccctgtaccaaaacttccgtgactttgttgcagcaaagaagcctaaagcctttatcgcagaaaacgtgaagggcctactcactgctaaccagcacaaggctattaagaccatattgaagacctcgaagctgttgagcctggctacatcgtcaagcctcgcctgtacaacttcgctgaatacggtgtcccacaattccgcgaacgtgtgctcattgttggcattcgccgtgacaccggctttgatttcaagcacccagctcctacccatggccctcgcggtgacatgccgtataagactgccggcgaagcgctcaaaggcgtgaaggatgtccccacaaacaac

SEQ ID NO: 128 - protein, 202 aa, Corynebacterium glutamicum
MSTKPTIVSTFSGCGGLDLGLQEVGFDPIWANDFSEEAVQTYKHNIGDHIVHGDITEIDPFTDDTIPDGDLVTGGFPCQDFSMIWKRPGLDGKRGTLYQNFRDFVAAKKPKAFIAENVKGLLTANQHKAIKTILKTSKLLSLATSSSLACTTSLNTVSHNSANVCSLLAFAVTPALISSTQLLPMALAVTCRIRLPAKRSKA

SEQ ID NO: 129 - DNA, 588 bp, Corynebacterium glutamicum
  CDS (101)..(565): RXN00127
atgtggtggttgtggggcgccgggggcgtcgttatgcagtgactgccagcgtgtgtggaggaagccgccaacattggcgcggcttgatttagatttaccggtgtggacgttgtcgccgtatgacggcccgcatcgcaacgtgctcattgcgctgaaggagcacggccgtgcagaccttgtggcgtttgtgggcgcggtggtgggggcgtcgataagctatctggcggctcagggggaaattgagcacgacatcacgctggttccggcgcccacccgcgccacctcgcgacgccggcggggcggcgatccggttgagcgggtgtgcaatgcatcacgcttatcgacgtttccctgccttcaaatctcatcccgcacaccagactccgtcggtcaaactgcgcaacagcgaagactcaatatgcgagtggagttagtccgacaacctcggggttctgtcttgatcatcgacgatgtggtaacaacgggggcaactatttccgcatctgcaaacgttcttcgcgcagcgggtgtgcaggtcagaggagctttaacttattgccaagcgtgatcttggatataaaaggggcc

SEQ ID NO: 130 - protein, 155 aa, Corynebacterium glutamicum
VWTLSPYDGPHRNVLIALKEHGRADLVAFVGAVVGASISYLAAQGEIEHDITLVPAPTRATSRRRRGGDPVERVCNASRLSTFPCLQISSRTPDSVGQTAQQRRLNMRVELVRQPRGSVLIIDDVVTTGATISASANVLRAAGVQVRGALTYCQA

SEQ ID NO: 131 - DNA, 864 bp, Corynebacterium glutamicum
  CDS (101)..(841): RXN02938
accatcgtggtttctccagacggcaatgtagtggacaccttcccgcagcctttcgaaaccatcgatgacctcgaaaccgctgtggcaggggcgctgcagaatgcgtaactaccctgatttaccgcatgatttcccaggtcaaaacacagagctcacccccgcaaaggcacccgtgtggatgcaccgactcttagaccgcatccacaccggccgcatggccaacccgctggacggtgcggaaacgctcggcgacacagactccgaaaagcgcgctgccgtgctcatgctattttctggctcggaaacctcctttgacctgcccaatgacgcctccgtgctgctgacgcaccgcaccccgacgatgcgttcccatgcaggtcagattgcctttcccggtggccgaatcgaccccaccgatactaacgccgtggactgcgccttccgcgaggcctgggaagaaaccgggctggatcgccgcaccgcaaccccattagcccagctcaacgaggtgcacatccgtgccaccggataccccgtctacccaatccttggacactggcacaccccatcacccgtcgccgtggccagcccacacgaaaccgacgaagttttggacgccccactctacgacctcatcgaccccaaaaaccgcctcatggtcggctggcgcgaatggcacggaccagcgtttcgaatcaacgactacatcatctggggattcaccggcggactactctccgcgatcctcgacaccgccggctgggccaccgaatgggacaccgaccgcatcttcgacctggaaaatacattgtcaacatctcgcaacaatgagcgtatgcgttaggctgacgggctccggtggcc

SEQ ID NO: 132 - protein, 247 aa, Corynebacterium glutamicum
MRNYPDLPHDFPGQNTELTPAKAPVWMHRLLDRIHTGRMANPLDGAETLGDTDSEKRAAVLMLFSGSETSFDLPNDASVLLTHRTPTMRSHAGQIAFPGGRIDPTDTNAVDCAFREAWEETGLDRRTATPLAQLNEVHIRATGYPVYPILGHWHTPSPVAVASPHETDEVLDAPLYDLIDPKNRLMVGWREWHGPAFRINDYIIWGFTGGLLSAILDTAGWATEWDTDRIFDLENTLSTSRNNERMR

SEQ ID NO: 133 - DNA, 597 bp, Corynebacterium glutamicum
  CDS (83)..(574): RXN03102
cgtggtcacgggtctgcagtacctgtgggattcacgaaagtccgcagaaagctagaccatgtcggagaatctggcggggcgagtggtggagctgttgaaatcgcgcggtgaaacgctggcgttttgtgaatccctcaccgccggccttgccagtgcgacgatcgcagagatccccggcgcctcagtggtacttaaaggcgggctggtcacctatgccaccgagcttaaggttgcgcttgccggtgtgccgcaggagcttatcgacgcgcacggcgttgtttccccgcagtgcgcccgtgcgatggcaacgggggccgcacacagatgccaggcagattgggcggtttcgctcacgggcgttgctggccccagcaaacaagatggtcatccggtgggggaagtgtggatcggagtggctggtcctgcgcattttggggcgtcgggaacaattgacgcgtatcgtgcgtttgaaagtgaacaacaggtaatattggctgaattgggacggcatcatattagagagtctgctgtgcagcaaagctttcgcctgctgattgaccatattgagtcgcagtgactcaagtttccaggtaaact

SEQ ID NO: 134 - protein, 164 aa, Corynebacterium glutamicum
VVELLKSRGETLAFCESLTAGLASATIAEIPGASVVLKGGLVTYATELKVALAGVPQELIDAHGVVSPQCARAMATGAAHRCQADWAVSLTGVAGPSKQDGHPVGEVWIGVAGPAHFGASGTIDAYRAFESEQQVILAELGRHHIRESAVQQSFRLLIDHIESQ

SEQ ID NO: 135 - DNA, 933 bp, Corynebacterium glutamicum
  CDS (101)..(910): RXN03118
acactcccgtcgatctagaggaacagcacgcgtacctgcagacgctctccattaaggaacgtctcgcgctggctgatcaggaagctgattaagtagatatatgaagcccaccgttaatgttgtgttcaatgcgcatcaccccaaagatacgcagccgttggataagttcttcgataaagaacttaaagacacacatcatctcgatataacggtgggttatatcagtgagaaatcactacaatatttgcttcttattgcaggcacttaccccgacctcaccattacacttacctgtggaatgcacgctcgtgaaggcatgactgctgcccaactgcatcatgcgcgagtgctccatgactacttaagcgaccatgatcgaggcggggtgttcgttattccccgattgcgttatcacgggaaaatctatcttttccacaagaaccagcacacagatcctattgcttatatcggtagcgctaacctctcagccatcgttcctgggtacacctctacattcgagcccggcgtcatcttagaccccgcacctgaagatctcgtgcttcatctcaaccgtgatgtcgtacccctatgtgtccccattgacaccgcgcatgtccccatcattaaagatcaagaatccccgatgaagcacgtcgctgaagcaacagctgtgtccacctctgatgttgttgccatcatgtccagcccatttacttatagttttgaccttaaactcaaagccactgccagcagcaacctcaatgctcataactcaggcggtggcgcgcgcaaacagaaaaacggtagcttccttgcacgcaattggtatgagggcgaaatcattgtcggtgtcgagacaacaagactcccaggttacccacaaaacaaatccgaattcactgcgggtcactgatgacggctggtcatttgttt

SEQ ID NO: 136 - protein, 270 aa, Corynebacterium glutamicum
MKPTVNVVFNAHHPKDTQPLDKFFDKELKDTHHLDITVGYISEKSLQYLLLIAGTYPDLTITLTCGMHAREGMTAAQLHHARVLHDYLSDHDRGGVFVIPRLRYHGKIYLFHKNQHTDPIAYIGSANLSAIVPGYTSTFEPGVILDPAPEDLVLHLNRDVVPLCVPIDTAHVPIIKDQESPMKHVAEATAVSTSDVVAIMSSPFTYSFDLKLKATASSNLNAHNSGGGARKQKNGSFLARNWYEGEIIVGVETTRLPGYPQNKSEFTAGH

SEQ ID NO: 137 - DNA, 1263 bp, Corynebacterium glutamicum
  CDS (101)..(1240): RXN02989
aggggtcactgctgcagtgctgttttagtcagtgctgaagtgatgcaaccgtaggaattttcgtccacatcaacgtcaataaaactaagaggaattaaaaatggctcccaagaagacagcaacaaaggcaactgccgccaaggggaatgatcgtcagaaggcacttgatgccgcactagccctgattgagaaggatttcggtaaaggcgctgtcatgcgtctgggtgatgagaatcgtccgccaatccagaccatctcatctggtaacaccgcgattgatattgccttgggtatcggtggattcccacgtggtcgaatcgttgaggtgtatggcccagaatcatcaggtaaaaccaccgttgcactgcacgcaattgcgcaggcacaaaaggccggcggcatcgctgcattcattgacgccgagcacgcgttggatccagattatgctcgcaagcttggtgtagatactgatgcgcttctggtttcgcagccagacactggtgagcaagcactagaaatcgccgacatgctggttcgttccggcgcaatcgacatcatcgtgattgactcggtggctgcgctgacaccaaaggctgaaattgaaggcgaaatgggcgatagccacgttggtcttcaggcccgcctcatgagccaggcgcttcgtaagatgacaggtgcgctgtacaactcgggtaccaccgcgatcttcattaaccagctgcgtgaaaagatcggtgtgatgttcggttccccagaaaccaccaccggtggtaaggccctgaagttctacgcatctgttcgttgtgacattcgacgaatccagactctgaaggacggacaggatgccattggtaaccgcacccgcttgaaggtcgttaagaacaaggtctccccaccgttcaagatcgctgaattcgacatcatgtacggcgaaggcatctcccgtgaatcctccgtcattgacttggcagtggacaacggcattgtgaagaagtcaggttcctggttcacctacgagggcgaacagcttggtcaaggtaaggaaaaggtgcgtctttccctcaaggagaaccctgaactcaccgatgagctggaagataagatcttcaagaagctgggagtaggcaagtacgctgcagcctcagatgaactcaccgacgatccagtagagctcgtgcctaacgttgacttcgatgatgaagccgacaccgaagccgacaccgaagcagacgctgaagactaagcaccagttttaacaaagca

SEQ ID NO: 138 - protein, 380 aa, Corynebacterium glutamicum
MAPKKTATKATAAKGNDRQKALDAALALIEKDFGKGAVMRLGDENRPPIQTISSGNTAIDIALGIGGFPRGRIVEVYGPESSGKTTVALHAIAQAQKAGGIAAFIDAEHALDPDYARKLGVDTDALLVSQPDTGEQALEIADMLVRSGAIDIIVIDSVAALTPKAEIEGEMGDSHVGLQARLMSQALRKMTGALYNSGTTAIFINQLREKIGVMFGSPETTTGGKALKFYASVRCDIRRIQTLKDGQDAIGNRTRLKVVKNKVSPPFKIAEFDIMYGEGISRESSVIDLAVDNGIVKKSGSWFTYEGEQLGQGKEKVRLSLKENPELTDELEDKIFKKLGVGKYAAASDELTDDPVELVPNVDFDDEADTEADTEADAED

SEQ ID NO: 139 - DNA, 1206 bp, Corynebacterium glutamicum
  CDS (101)..(1183): RXN03168
ccctcgattattacaatccggctacttcggaagcgtttgtggccggatttttctatcctggaaggtattaatacttctttaagggtcggaggattttcgtatgtctactagaacaacgccacaagaccgttataccgacgaatacggcatcgaacgcgtcaacaaggatgaacccggcctggtggacaaactccgggacaagcacgactggtttgatcatctcatgcgcatgaatgaacgtttcggcgcaaaaggtggcaaccaattgtcggcgggtattacgtatttctccgtgctgtcgatcttcccgattgccatgcttgtcttcggtattgcaggtgtcatccttgccggaaaccctgaagttctcacagatattcaaaatcgaatcaacgatgctttagaaggcgagatcggtaacaccgtcaacggcatcattgattccgcgattgcgcagcgtggtgctgtgttgggcattggtggtgtaactgccctgtggtctggactggggtggatggcgaacctgcgctttggagtttcccgcatgtgggccattgacccaactgaaggcaacttcattcaaaagaagctcaccgacttggtcgcgctgatcgtcttgctgctggccatgggcgtagccttcggtatcacggcgctcggtgcttccggactaaccaaaaacctgctggactttgtgggcctgggggagattccgggcattagctacatcacctgggtggtcgcagcacttgttggtgtcttggctaacttcctggtgttcatgtggctgattttctccctgccacgtaccaaagttcccatgaaaccgggtcttcaggcagcactgcttggcgcaatcggttttgaggtggtcaagcaggttggatcgctgttggcttcaaatgcattgagtaaccccgcgggtgcagcattcggtccgatcatcggcatcatggttgtgctgtatttgatctggcgcatcctcatgtattgctctgcgtgggctgccaccagtgaagaagcgttgcgtcttgcgactgttccagcaccagagcctgcgatcattcgggttcgccatgaaattgatccaggtgaagaagtctcccaatctgctcgaaaagtgggcattggagtggccgtgggtgccgcgactgcgggtgcttttgcgctgttgcgtaaaaaatagtttttattaagggcattccc

SEQ ID NO: 140 - protein, 361 aa, Corynebacterium glutamicum
MSTRTTPQDRYTDEYGIERVNKDEPGLVDKLRDKHDWFDHLMRMNERFGAKGGNQLSAGITYFSVLSIFPIAMLVFGIAGVILAGNPEVLTDIQNRINDALEGEIGNTVNGIIDSAIAQRGAVLGIGGVTALWSGLGWMANLRFGVSRMWAIDPTEGNFIQKKLTDLVALIVLLLAMGVAFGITALGASGLTKNLLDFVGLGEIPGISYITWVVAALVGVLANFLVFMWLIFSLPRTKVPMKPGLQAALLGAIGFEVVKQVGSLLASNALSNPAGAAFGPIIGIMVVLYLIWRILMYCSAWAATSEEALRLATVPAPEPAIIRVRHEIDPGEEVSQSARKVGIGVAVGAATAGAFALLRKK

SEQ ID NO: 141 - DNA, 899 bp, Corynebacterium glutamicum
  CDS (1)..(876): RXN02431
gatccacttcctgtgggcgcactttggggagtgggtcctgtgacaggctccaagcttgcctcaatgggggtggaaacaattggtgatctagcagcgctaacccaaaaagaagtagaaatcagcctcggtgcaaccatcggaatatcactgtggaaccttgcccgaggaatcgacgaccgccctgtggaaccccgcgccgaagcaaaacagatctcccaagagcacacctatgaaaaagacctcctcaccaggcaacaagtagatgctgccatcattcgatcagccgaaggcgcacaccgacggctcctcaaagacggacgcggtgccagaactgtcagcgtgaaactgcggatggccgactttcgtattgagtctcgttcctacaccttgtcctatgccaccgatgattacgcaactcttgaggcaacagcattccgacttgcccgctaccccggagaagtaggccccatccgccttgtcggagtaagtttttctggtttggaagaatcccgccaagacatcctcttcccggaacttgaccaacaaatcatcgtaccaccagcacccgacaccgattatgaggtaggcgtgcaatcctcttctagttccgaaagtactcaagttgaagcgccgcaagatgtcgcgttgagtatgtggtgcgcaacgcaagatgtctaccacccagaatatggccacggttgggtacaaggtgccggtcacggtgttgtatcagtacgttttgaaacccgcagcaccacaaaagggcgaactaaaagtttttccatggatgacccggacctcaccccggcagaccctctagatagtttggattgggctgactggtttgctgaaaatggtgaaacgggggatgacgaatagggtttcatcgggtttcgggg

SEQ ID NO: 142 - protein, 292 aa, Corynebacterium glutamicum
DPLPVGALWGVGPVTGSKLASMGVETIGDLAALTQKEVEISLGATIGISLWNLARGIDDRPVEPRAEAKQISQEHTYEKDLLTRQQVDAAIIRSAEGAHRRLLKDGRGARTVSVKLRMADFRIESRSYTLSYATDDYATLEATAFRLARYPGEVGPIRLVGVSFSGLEESRQDILFPELDQQIIVPPAPDTDYEVGVQSSSSSESTQVEAPQDVALSMWCATQDVYHPEYGHGWVQGAGHGVVSVRFETRSTTKGRTKSFSMDDPDLTPADPLDSLDWADWFAENGETGDDE

SEQ ID NO: 143 - DNA, 456 bp, Corynebacterium glutamicum
  CDS (101)..(433): RXN02985
gagtacggttccaagattcaccgtgcggtgaaggaaatactcgctgagtttgaatcttaaaaaggaaaccgccttccacattgtgggaggcggttttctcatgcgattagaatcttatgccatggctaagaaagtagacacctcgaacgctacccccgctctagcccttcttacggagaggcagattccttttgagctggatgttcatgatgtagatccaaaatcatcaaagggctttgcattggatgcctctgaagtaatgggtgtggagccggaagtggtgtttaaaacgctcatggcagatattgatggtgaacacgtggtcgcgattgttccagccagcagaacgttgaatctcaagcagttggctaaggctggaaaaggtaagcatgcaaacatgatggatcgcagccgtgcacaggtagttacggggtaagtccctggtggaatctcacc

SEQ ID NO: 144 - protein, 111 aa, Corynebacterium glutamicum
MRLESYAMAKKVDTSNATPALALLTERQIPFELDVHDVDPKSSKGFALDASEVMGVEPEVVFKTLMADIDGEHVVAIVPASRTLNLKQLAKAGKGKHANMMDRSRAQVVTG

SEQ ID NO: 145 - DNA, 261 bp, Corynebacterium glutamicum
  CDS (101)..(238): RXN02986
aggtaagcatgcaaacatgatggatcgcagccgtgcacaggtagttacggggtaagtccctggtggaatctcaccgattgggcagaagaacaagcaccgcgtgtttttggatgagtctgcaattctccaggagcgaatctacgtcagcgcagggcgacgcgggtggtccctgattatcgccccggatgatgttcttctggctaccgatggtgtttacgcggatattgctgatcattcataaaaggtaaaacccacccccgc

SEQ ID NO: 146 - protein, 46 aa, Corynebacterium glutamicum
VFLDESAILQERIYVSAGRRGWSLIIAPDDVLLATDGVYADIADHS

SEQ ID NO: 147 - DNA, 2790 bp, Corynebacterium glutamicum
  CDS (101)..(2767): RXS00061
tgaaagcaatattagaccatcaatgattaggaatggaaattaggggtctggtttgggtgaatgtgtcgctaatttttccactcgcctacactcgggaggcgtgactgagaagactgaccagaccttaatgcttatcgacggccactcgatggctttccgcgcattctttgctttgccggctgagaatttctccacgtcgggcgggcaggccaccaatgctgtctatggctttctctcgatgctgtccacgttgttgaaggatgagcagcctactcatgtggcggtggctttcgatgtggggcgtaagacgttccgtaccgatatgttcccggcgtataaggcgcagcgtgaagcaacgccacctgagtttaagggccaggtggaaatcctcaaggaggtgttgtccactttgggaattacgactattgagaaaatcgattttgaggctgatgatgtgatcgccacgttgtctgtggcggcgaaacctttaggctttaagacgctgattgttacgggtgaccgtgattccttccagttggtcaatgacaccaccacggtgttgtatccgatgaagggcgtgtctgtgctgcaccgtttcacgccggaagcagtggaggagaagtatggactgacaccgaggcagtatccggagtttgcagcgctgcgtggtgatccttccgataacttgcctaatattcctggcgtgggcgagaagactgctaccaagtggattgcccagtatgaaactttggataatttgcttgatcacgctgatgagatcaagggcaaggttggcgccagcctgcgtgagcgcattgagcaggtccggatgaaccgcaagctcacggagatggtgaaggatctggagctgccgcttggtccggacgattttgagatgaagcctgtgcaggttgcggaggttgcggcgaagtttgacgatctggagtttggtaccaatttgcgtgagcgggtgctggcggtggtgaaggccgagggttccgctgcccccgtggaggaagtggaagcggaacaggttgtcgtcgatacgcaatctttggcgcaatggctgcctgctagggctggccaggcgcttgctttagcgctggctggagtggctaaacctgctgctggcgacacgtatgcgctagcgattgcggataccaagcgccatgcggtgttggttgatgtggctgatatttcagcggaggatgaaaaggcgctggccacgtggttggcgtcggaagatccaaagatgctgcacggcgctaaggccgcctatcatatgctcgctgggcgcggttttgagctgcacggcgtggtgcatgacacggcgatcgcggcatacttgctgcgtccgggccaacgcacctatgagcttgccgacgtctaccagcggcatcttcaacgacagttgtctacaaacgacaatggcggccagctcacgctgctcgacgcagctgatgaccaatcgcttgttgatgatgtcattgcaatccttgagctgtctgaagaattgaccaaacagcttcaggagattcaagcttttgagctttaccatgacctggaaattccgctgtcgggaattctggcgcgcatggaggccatcggtatcgctgttgatgttgccactttggaagagcagttgaagactttcattggtcaggttgctcaggaagaggaagcagctcgcgagctcgctgaggatccaaccctgaatctctcgagcccgaagcagctgcaagtggtgctttttgagacgttcggaatgccgaaaaccaagaaaaccaagaccggctactctacggctgccgcggaaattgaagccctagcgatcaagaatccgcacccattcctagatcacctgttggcacaccgtcagtaccaaaagatgaagaccactctggaaggtctcatccgtgaggtggctcctgatggccgtattcacaccaccttcaaccagacggtggcgtctacgggacgtttgtcatccactgatcccaacctgcaaaacattcctgtgcgcactgaggctggccgaaagattcgttcgggattcgtcgtaggcgaggggtatgaaaccttgctgactgccgactattcgcagattgaaatgcgcgtgatggctcacctttcccaggacccaggcttgattgaggcgtaccgcgaaggcgaagacctgcacaattacgtgggttccaaggtgtttaatgtgcccatcgatggcgtgacccctgagctgcgtcgccaggtcaaggccatgtcttacggtctggtgtacggcttgtccgcgtttggtttgtctcagcagctgagcattcctgctggcgaagcgaagcagatcatggagtcctacttcgagcgcttcggcggagtacagcgctacctccgggagatcgtggaggaggctcgaaaagctggctacacggaaacgctctttgggcgtcgtcgctacctgccggaactgacctcggataaccgtgtcgctcgtgaaaacgctgaacgtgccgcactgaacgccccgattcagggaactgccgcagacatcatcaaggtggccatgatccgggtggaccgttcactcaaggaagctgccgtgaaatctcgcgtgctgcttcaggtgcatgatgaattggtcgtggaagtagcggccggtgagttggaacaagtccgtgagattctggaacgcgaaatggataacgccatcaagctgtccgttcctttggaagtttcagctggtgatggcgttaactgggatgctgcagcgcactaagaggtaactgccttttcgtc

SEQ ID NO: 148 - protein, 889 aa, Corynebacterium glutamicum
VTEKTDQTLMLIDGHSMAFRAFFALPAENFSTSGGQATNAVYGFLSMLSTLLKDEQPTHVAVAFDVGRKTFRTDMFPAYKAQREATPPEFKGQVEILKEVLSTLGITTIEKIDFEADDVIATLSVAAKPLGFKTLIVTGDRDSFQLVNDTTTVLYPMKGVSVLHRFTPEAVEEKYGLTPRQYPEFAALRGDPSDNLPNIPGVGEKTATKWIAQYETLDNLLDHADEIKGKVGASLRERIEQVRMNRKLTEMVKDLELPLGPDDFEMKPVQVAEVAAKFDDLEFGTNLRERVLAVVKAEGSAAPVEEVEAEQVVVDTQSLAQWLPARAGQALALALAGVAKPAAGDTYALAIADTKRHAVLVDVADISAEDEKALATWLASEDPKMLHGAKAAYHMLAGRGFELHGVVHDTAIAAYLLRPGQRTYELADVYQRHLQRQLSTNDNGGQLTLLDAADDQSLVDDVIAILELSEELTKQLQEIQAFELYHDLEIPLSGILARMEAIGIAVDVATLEEQLKTFIGQVAQEEEAARELAEDPTLNLSSPKQLQVVLFETFGMPKTKKTKTGYSTAAAEIEALAIKNPHPFLDHLLAHRQYQKMKTTLEGLIREVAPDGRIHTTFNQTVASTGRLSSTDPNLQNIPVRTEAGRKIRSGFVVGEGYETLLTADYSQIEMRVMAHLSQDPGLIEAYREGEDLHNYVGSKVFNVPIDGVTPELRRQVKAMSYGLVYGLSAFGLSQQLSIPAGEAKQIMESYFERFGGVQRYLREIVEEARKAGYTETLFGRRRYLPELTSDNRVARENAERAALNAPIQGTAADIIKVAMIRVDRSLKEAAVKSRVLLQVHDELVVEVAAGELEQVREILEREMDNAIKLSVPLEVSAGDGVNWDAAAH

SEQ ID NO: 149 - DNA, 1683 bp, Corynebacterium glutamicum
  CDS (101)..(1660): RXS00212
ttagagcgtgccgctactcgtggtgatggtcgcgtgggcgaggacatcacggccaatgctcgcgtgatcgaagatatcccgcaccagcttcagggcactgatgaatatcctgtgcctgctgtgctggaaattcgcggtgaggtgttcatcactgtggaggatttcccaggaggtcaacgcgcagcgcattgctgatggtggcaagccgtttgccaacccgcgtaatgctgcggctggttctctgcgtcagaaaaatattgaggacgtgaagaagcgccgcctgcggatgatcagccatggcatcggtttcactgaaggctttagccctgcgtctcagcatgatgcgtatctggcattggctgcctggggtttgcccacctcgccgtacacagaggctgtgactgatccagaagatgtggtgaaaaaggtcagctactgggctgatcaccgccacgacgcactccatgagatggatggcctggtgattaaggtcgatgacatcgcatctcagcgtgctttgggttccaccagccgcgcgcctcgctgggccattgcgtacaagtaccctccggaggaggtcaccaccaagctgcttgatattcaggttggcgttggtcgcaccggccgtgtcaccccattcgcggtcatggagccggttcttgttgcaggatcaacggtgtctatggcgacgctgcataaccagagcgaagtcaagcgtaaaggcgtgctcatcggtgacaccgtggttatccgcaaggcgggcgaggttatcccagaggtgcttggccctgtcgtagagcttcgtgacggcacagagcgcgagtacatcttcccaacgctgtgccctgaatgcggtacccgtctggcgcccgcgaaggccgatgacgtggattggcgttgccccaacatgcaaagctgtccaggtcagctgtccacgcgtttgacctaccttgctggtcgtggcgcttttgatattgaagcattgggcgaaaagggcgctgaagacctcattcgcaccggcattttgcttgacgagtctggcctgttcgacctcacagaggacgatctgctgagctccaatgtctacaccaccaacgccggcaaagtaaatgccagcggcaagaaactgctggacaacctgcaaaaatccaagcagaccgacctctggcgagtcctcgtggcattatctatcaggcacgtaggccccaccgcagcgcgcgcccttgcaggtcgctaccactccatccaggcgcttatcgacgcccccctcgaggaactctccgaaaccgatggagtaggtaccatcattgcccaatccttcaaggactggttcgaggttgattggcacaaggccatcgtggacaagtgggcagccgctggtgtgactatggaggaagaagtaggggaggtcgctgaacaaacccttgaaggcctaaccatcgtggtcaccggagggttggaaggcttcaccagagattcggtgaaggaagccatcatctcccgtggcggaaaagcctctggatctgtctcgaagaaaactgactacgtggtgattggtgaaaacgcaggttccaaggccaccaaggcagaagaactagggctgcgcattctggatgaggcaggattcgtccgtttgctcaataccggctcagctgacgaatagtcgcacatgaaaatgcccca

SEQ ID NO: 150 - protein, 520 aa, Corynebacterium glutamicum
MNILCLLCWKFAVRCSSLWRISQEVNAQRIADGGKPFANPRNAAAGSLRQKNIEDVKKRRLRMISHGIGFTEGFSPASQHDAYLALAAWGLPTSPYTEAVTDPEDVVKKVSYWADHRHDALHEMDGLVIKVDDIASQRALGSTSRAPRWAIAYKYPPEEVTTKLLDIQVGVGRTGRVTPFAVMEPVLVAGSTVSMATLHNQSEVKRKGVLIGDTVVIRKAGEVIPEVLGPVVELRDGTEREYIFPTLCPECGTRLAPAKADDVDWRCPNMQSCPGQLSTRLTYLAGRGAFDIEALGEKGAEDLIRTGILLDESGLFDLTEDDLLSSNVYTTNAGKVNASGKKLLDNLQKSKQTDLWRVLVALSIRHVGPTAARALAGRYHSIQALIDAPLEELSETDGVGTIIAQSFKDWFEVDWHKAIVDKWAAAGVTMEEEVGEVAEQTLEGLTIVVTGGLEGFTRDSVKEAIISRGGKASGSVSKKTDYVVIGENAGSKATKAEELGLRILDEAGFVRLLNTGSADE

SEQ ID NO: 151 - DNA, 696 bp, Corynebacterium glutamicum
  CDS (101)..(673): RXS00213
aggtctgcacccattcatacgcgaattttgacgtgagttttagctttccgagcacctgtgcgaatggccgtgtccacccttagggttagaatcgggaaccgtgactgaagataatgctcaactgcgtagaacgtggaacgacttagccgagaaggttcgttatcaccgagatcgttattacaacgaacagccagagatccctgatgctgattttgatgcgctttttaagcagcttcagcagttggaagaagaccacccggagctcgccgtccctgatagccccaccatggttgtgggcgctccggtggcagagcaatcaagctttgacaatgttgagcacttggagcgaatgctcagcttggacaatgtttttgatgagcaggagttgcgtgattggttgggcaggacgccagccaagcagtatttgacggagttgaaaattgatggcttgtccatcgacttggtgtatcgcaatggccagttagagcgtgccgctactcgtggtgatggtcgcgtgggcgaggacatcacggccaatgctcgcgtgatcgaagatatcccgcaccagcttcagggcactgatgaatatcctgtgcctgctgtgctggaaattcgcggtgaggtgttcatcactgtggaggatttcccaggaggtcaacgcgcagcgcattgctgatggtggcaagccgtttgcca

SEQ ID NO: 152 - protein, 191 aa, Corynebacterium glutamicum
VTEDNAQLRRTWNDLAEKVRYHRDRYYNEQPEIPDADFDALFKQLQQLEEDHPELAVPDSPTMVVGAPVAEQSSFDNVEHLERMLSLDNVFDEQELRDWLGRTPAKQYLTELKIDGLSIDLVYRNGQLERAATRGDGRVGEDITANARVIEDIPHQLQGTDEYPVPAVLEIRGEVFITVEDFPGGQRAAHC

SEQ ID NO: 153 - DNA, 2100 bp, Corynebacterium glutamicum
  CDS (101)..(2077): RXS00724
cggcaaaggaagccacagcgattaaaaaggcgctgggctacaccactgcggaagagttgctccgccaccatgtgcgcaaatactccaccacggctctggcgtgggaattggtgatgccactgagggcgatcttgttaccatcgtgggtcaggtcgcctttgccaagcagtcctatacccagtccggcaagatgctgtacaaggttacagtcttgactgagacggaacgcatcggcatttccttcttcggagccaagcacattccgcgtcttctcccagaaggcactcgtgcgctttttaccggcaaggtgaagttttttcgcaacgaacctcagctatctcatccagagttcattgtgatcccagatcctggatcaggccgccgactcaccgccactggcggtatgaaatctctggctgcctacggcgatgtggaagaagtggcacttcgtttggtggatcgcgaatacatcccgatctatgccggcaccgccaccatgactacctggcggatcatggctgcagtgcaacgggtactggaaaccatgccggtgatcaaagaaccactgagcgtggtgcccgaaggcatgcccagtttcgacgaggccatccgcggcattcacgatccaggccatgaatctcccagcacgtttatcaaccgtctgaaatacaacgaagcactatcgctggccacggtgatggcgatccggcgtgccgataccaagaaccgcaaagcaccacccatgccgcgcgcactcaaagggcatcagcacatgctcatcgatgcactcaactttcagctcacagtgggacagaagcaagtgatccgtgagatcagcgcggacattgaacaacgcgttcccatgtctcgtctgctccaaggtgaggttggttcgggtaaaaccatcgtgtcgttgatcgcgatgctgcaggcaattgattccggtaggcagtgcgccatgctcgccccgacggaagtgttggccacccagcatgcccgcagcctgagcaaaactctcgacgacgcaggccttgatatcaatgttgtgctcttgactggctcgatgcccacgggagccaagaaggaggctctgctggaaatcatctccggtgacgcagacattgtggtcggcacgcatgcgctgatccaggacaccgtggagttcttcgaccttggcctcgtggtggtggatgagcagcaccgtttcggcgtggagcaacgcgatcaactgcggaccaagggcagggaaggcctgaccccgcacctattggttatgactgcgaccccaattccgcgcaccatcgccatgacggtgttcggcgacttggcggtgtccacgttgcgtgaacttccaggcgggcgccggccgattcaaacctcggtgatacccgatcacaaacctggctgggttaaacgcggttgggaacgcatcggtgaggaagtcctcgccggacgccaagcctatgtggtgtgtccgcgcattgaaggcgaaggcggcgtgctggaaatccacgcctatctttccgaacaggtatatccaggattgaatgttggaatgctgcacggtcgcatggacacggatctcaaagattcggtcatgcaggaattcgcccaaggtgagatcgatattttggtcgccaccacggtcattgaggtcggtattgacgttgccaacgccaccgtcatgctcatccgcgaggcggaacgcttcggcgtttcccagatccaccagctgcgcggccgtgttggccgtgggcagcacgattccctctgcctgctgcacaccaccttcgacgaggactccccacaaggccaacgcctcgccgcaatttccaccacaaccgacggttttcaactctctgaacttgatttgcaggtacgccaagaaggcgacgtgttgggcacccgccagtccggcagcgacaccaaactccgtcacctctcgtttatcagcgaccaaaaaatcatcgagcgtgcgcttatcgacgccaccgagctggttgccgccagccgttccagggcgcttgagctggtcagcgacatcgcaatgatcaaccaggaatacctggaaaagagctgatattgatagggtttaagtca

SEQ ID NO: 154 - protein, 659 aa, Corynebacterium glutamicum
VGIGDATEGDLVTIVGQVAFAKQSYTQSGKMLYKVTVLTETERIGISFFGAKHIPRLLPEGTRALFTGKVKFFRNEPQLSHPEFIVIPDPGSGRRLTATGGMKSLAAYGDVEEVALRLVDREYIPIYAGTATMTTWRIMAAVQRVLETMPVIKEPLSVVPEGMPSFDEAIRGIHDPGHESPSTFINRLKYNEALSLATVMAIRRADTKNRKAPPMPRALKGHQHMLIDALNFQLTVGQKQVIREISADIEQRVPMSRLLQGEVGSGKTIVSLIAMLQAIDSGRQCAMLAPTEVLATQHARSLSKTLDDAGLDINVVLLTGSMPTGAKKEALLEIISGDADIVVGTHALIQDTVEFFDLGLVVVDEQHRFGVEQRDQLRTKGREGLTPHLLVMTATPIPRTIAMTVFGDLAVSTLRELPGGRRPIQTSVIPDHKPGWVKRGWERIGEEVLAGRQAYVVCPRIEGEGGVLEIHAYLSEQVYPGLNVGMLHGRMDTDLKDSVMQEFAQGEIDILVATTVIEVGIDVANATVMLIREAERFGVSQIHQLRGRVGRGQHDSLCLLHTTFDEDSPQGQRLAAISTTTDGFQLSELDLQVRQEGDVLGTRQSGSDTKLRHLSFISDQKIIERALIDATELVAASRSRALELVSDIAMINQEYLEKS

SEQ ID NO: 155 - DNA, 903 bp, Corynebacterium glutamicum
  CDS (101)..(880): RXS00823
caaatgcaaaaagcatcagcaagagcgggatgatcaccacaagcaaacctgtcatgggagtcattctaatgatgaatcaaatccgcgctaacttaagggtatgggttccattactccgcagaagcggcctcgcgtggggtctcacatcgcgaacaagggtcaagagactgatatcgggcgaaaacgccgagctcgacgcatcaatcgcacactcaccgtggcatatccggatgcgcactgcgaattagatttcaccaatccgctagaactcacggtcgccaccattttgtccgcccagtgcacggacgttcgcgtgaaccaggtgacgcccgcgttgttcaagcgctatccgacggccacagattacgccaacgccgatcgcacggaattggaggagttcatccgtccgacaggcttttaccgcaacaaggccacttctttaatcggcctgggtgaggcactaatttcgcttcacgacggccaggtccccggtacccttgagcagctagttgagctgccgggggtcgggcggaaaaccgccaacgtggtgctgggaaatgctttcggtgttccgggaatcacggtggatacacactttggcaggttggtgcgtcgcctgaagctcactgatgaagaagatcccgtcaaggtggaaaaagtgatgaacgaactcatcgaaaagcctgagtggaccatgttttcacataggctgatcttccacggacgtaggatatgtcatagtcgacgcgccgcctgtggagcctgcatgctggcagctgattgcccatcctttggtttggaggggccgtcagatccatttgaggcgcaaaaactcattaaaagtgatgatagggagcacctgctgaaaatggcaggaatgtagaaaacaaatgacaagcagtg

SEQ ID NO: 156 - protein, 260 aa, Corynebacterium glutamicum
MGSITPQKRPRVGSHIANKGQETDIGRKRRARRINRTLTVAYPDAHCELDFTNPLELTVATILSAQCTDVRVNQVTPALFKRYPTATDYANADRTELEEFIRPTGFYRNKATSLIGLGEALISLHDGQVPGTLEQLVELPGVGRKTANVVLGNAFGVPGITVDTHFGRLVRRLKLTDEEDPVKVEKVMNELIEKPEWTMFSHRLIFHGRRICHSRRAACGACMLAADCPSFGLEGPSDPFEAQKLIKSDDREHLLKMAGM

SEQ ID NO: 157 - DNA, 912 bp, Corynebacterium glutamicum
  CDS (101)..(889): RXS00898
caggtatcggcctgtatcaaaagctcgggttcagtgaacaccaccgacaccggtacgccgaacggaaattctaaaatccaaaacagctagggtataagtcatgcgcatcgttaattggaacgtcaactctgctcgcactcgtgtggaccggatggtcgattttttgcttcgccatgatgttgatgtattagcggtgcaggaaaccaagtgtaaagatgagcaatttcccaccgagcgtttcaccgaaatcggctatgaggtagcccatttcggccttaaccagtggaatggtgtcgccattatttcccgcgttggcattgaaaatgtggaaacccacttccctgcccaaccgggattcaacaaagacatcaccaaggaacaatccatcgaagcccgcgccatcggcgcccgctgcggtggtgtccaggtgtggagcctctatgttcccaacggccgcgaaatcgcagatcctcactacgactacaaactgcgctggctattctccctgcgcaactacgtgatcgacaccttggaataccgccccgaggaaaaactggtgttgctcggcgacttcaacatcgcgcccacagacatcgacgtctgggacatcgcagccttcgaaggaaaaacccacgtcaccgaaccagaacgtgcagctttcgacggcctcatcgaagccggactcaaagaaaccacccccggacctggtacctacacctactgggattacaaaggcgcacgcttcctcaaaggcgaaggcatgcgcatcgatttccagctcgcatccccggcccttgctgcaaccgcgggtgaaacctttgtggacgttgaagaacgcagcggaaccggcgcctctgaccacgcaccagtcatcgttgattacaaggtgtaactgcgtatgatctttcagat

SEQ ID NO: 158 - protein, 263 aa, Corynebacterium glutamicum
MRIVNWNVNSARTRVDRMVDFLLRHDVDVLAVQETKCKDEQFPTERFTEIGYEVAHFGLNQWNGVAIISRVGIENVETHFPAQPGFNKDITKEQSIEARAIGARCGGVQVWSLYVPNGREIADPHYDYKLRWLFSLRNYVIDTLEYRPEEKLVLLGDFNIAPTDIDVWDIAAFEGKTHVTEPERAAFDGLIEAGLKETTPGPGTYTYWDYKGARFLKGEGMRIDFQLASPALAATAGETFVDVEERSGTGASDHAPVIVDYKV

SEQ ID NO: 159 - DNA, 849 bp, Corynebacterium glutamicum
  CDS (101)..(826): RXS01066
aaacgtattccttgacctgcgcatcaaggtgctgaagaactggcaatccgatccaaaggctttgaaccgcctgggcttctagctttaagggggtgagttcatgcgtagggacagttttcgggaccgcgcgctagtagtcaaaacttatgattttggcgaagccgaccgcattattgtgctgctcacccgagaccacggcatcgtgcgcggagttgccaaaggagtacgccgatccaaatcccggtttgggtcaaggctgcagctttttgtggaactcgacgtgcagctctacccaggtagaaaactgtccaccatctctggcgcggacaccgtcggctactacgcatcaggcatcatcgaggacttcactcggtattcctgtgcgtccgccatcctggaaatcgccacccacatcgcaggactggaaaacgatccgcacctgtttgaagaaaccacccgggcgttgaaaaacattcaggactccccagaacccatcctcaacctagacgagttcatgctccgcgccatgaaccacgccggctgggcaccaagccttttcgactgcgcagcctgcggccgaccaggacctcacaacgcattccacccaggcgtcggcggggcagtgtgcctgtactgccgaccgccgggaagcgccgaagtcccaccagaagcactacacatgatgtggttggtcgccaacggccaagcagcccgcattccccgggaacacccagagcagcaaaccaccattcaccaactgacaaccgcgcatctgcagtggcatattgaaagaaagctgcccacgctggcggtgctggatcaggcctagtgcttaggcttaggcgtccg

SEQ ID NO: 160 - protein, 242 aa, Corynebacterium glutamicum
MRRDSFRDRALVVKTYDFGEADRIIVLLTRDHGIVRGVAKGVRRSKSRFGSRLQLFVELDVQLYPGRKLSTISGADTVGYYASGIIEDFTRYSCASAILEIATHIAGLENDPHLFEETTRALKNIQDSPEPILNLDEFMLRAMNHAGWAPSLFDCAACGRPGPHNAFHPGVGGAVCLYCRPPGSAEVPPEALHMMWLVANGQAARIPREHPEQQTTIHQLTTAHLQWHIERKLPTLAVLDQA

SEQ ID NO: 161 - DNA, 1740 bp, Corynebacterium glutamicum
  CDS (101)..(1717): RXS02145
cactgccacagctgccaattaccgttgatgaagagggctacctcatcgccgctggtaacttcattgagccactcggccctgcattctgggagcgtaagtcatgagtctagctaccgtgggaaacaatcttgattcccgttacaccatggcgtcgggtatccgtcgccagatcaacaaggtcttcccaactcactggtccttcatgctcggcgagattgcgctttacagcttcatcgtcttgctgctgactggtgtctacctgaccctgttcttcgacccatcaatcaccaaggtcatttatgacggcggctacctcccactgaacggtgtggagatgtcccgtgcatacgcaactgcgttggatatttccttcgaggttcgcggtggtctgttcatccgccagatgcaccactgggcagccctgctgttcgttgtatccatgctggttcacatgctccgtattttcttcaccggtgcgttccgtcgcccacgtgaagcaaactggatcatcggtgttgttctgatcatcctgggtatggctgaaggcttcatgggttactccctgcctgatgacctgctctctggtgttggtcttcgaatcatgtccgccatcatcgttggtcttccgatcataggtacctggatgcactggctgatcttcggtggagacttcccatccgatctgatgctggaccgcttctacatcgcacacgttctaatcatcccagctatcctgcttggcttgatcgcagctcacctggcacttgtttggtaccagaagcacacccagttcccaggcgctggccgcactgagaacaacgtgatcggtatccgaatcatgcctctgttcgcagttaaggctgttgctttcggcctcatcgtcttcggtttcctcgcactgcttgctggtgtcaccaccattaacgcaatttggaatcttggaccgtacaacccttcacaggtgtctgctggttcccagcctgacgtttacatgctgtggacagatggtgctgctcgtgtcatgccggcatgggagctctacctcggtaactacactattccagcagtcttctgggttgctgtgatgctgggtatcctcgtggttctgcttgtgacttacccattcattgagcgtaagttcaccggcgacgatgcacaccacaacttgctgcagcgtcctcgcgatgttccagtccgcacctcactcggtgtcatggcgcttgtcttctacatcctgcttaccgtttctggtggtaacgatgtttacgcaatgcagttccatgtttcactgaacgcgatgacctggatcggtcgtatcggcctcatcgttggaccagctattgcatacttcatcacttaccgactgtgcatcggcttgcagcgctctgaccgcgaggtcctggagcacggcatcgagaccggtatcatcaagcagatgccaaatggtgccttcattgaagttcaccagccacttggcccagttgatgaccatggtcacccaatcccactgccatacgctggcgctgcggttccaaagcagatgaaccagcttggttacgctgaggttgaaacccgcggtggattcttcggacctgatccagaagacatccgtgcgaaggctaaggaaattgagcacgcaaaccacattgaggaagcgaacactcttcgtgcactcaacgaggcaaacattgagcgtgacaagaatgagggcaagaactagtttctaggacttcatctctg

SEQ ID NO: 162 - protein, 539 aa, Corynebacterium glutamicum
MSLATVGNNLDSRYTMASGIRRQINKVFPTHWSFMLGEIALYSFIVLLLTGVYLTLFFDPSITKVIYDGGYLPLNGVEMSRAYATALDISFEVRGGLFIRQMHHWAALLFVVSMLVHMLRIFFTGAFRRPREANWIIGVVLIILGMAEGFMGYSLPDDLLSGVGLRIMSAIIVGLPIIGTWMHWLIFGGDFPSDLMLDRFYIAHVLIIPAILLGLIAAHLALVWYQKHTQFPGAGRTENNVIGIRIMPLFAVKAVAFGLIVFGFLALLAGVTTINAIWNLGPYNPSQVSAGSQPDVYMLWTDGAARVMPAWELYLGNYTIPAVFWVAVMLGILVVLLVTYPFIERKFTGDDAHHNLLQRPRDVPVRTSLGVMALVFYILLTVSGGNDVYAMQFHVSLNAMTWIGRIGLIVGPAIAYFITYRLCIGLQRSDREVLEHGIETGIIKQMPNGAFIEVHQPLGPVDDHGHPIPLPYAGAAVPKQMNQLGYAEVETRGGFFGPDPEDIRAKAKEIEHANHIEEANTLRALNEANIERDKNEGKN

SEQ ID NO: 163 - DNA, 1002 bp, Corynebacterium glutamicum; identical to SEQ ID NO: 31
  CDS (101)..(979): RXS02476

SEQ ID NO: 164 - protein, 293 aa, Corynebacterium glutamicum; identical to SEQ ID NO: 32

SEQ ID NO: 165 - DNA, 720 bp, Corynebacterium glutamicum
  CDS (101)..(697): RXS02990
gaagactaagcaccagttttaacaaagcagggacaatccacacacttaaaccatgatgtggcttgttcctgctttttcgtcaacgaagggcaacaacgcgatggatatccaagccgaaaagattgaaaagctcagaaaagcactcgacaactttgaacgcgctcatgcgcgaggcgaatcagacttctttgaccatgaaaaagaagaaaagaaagccaacgtacgcagacgtgccctgctgctgcttaaccaacgcgcacgatcagtcaacgaactaagcaccagacttaaagcactggagtttgaggaagacatcatcaatgaggtcattggcgatctcaccagatccaaactgcttgatgatgaagtttttgccactgagtgggttcggcaacgtgctgccaggcgaggaaaatcttcgcgtgcgctggaccgcgaactgcaggaaaaaggcgtcgacaagcaaacgcgtgctgcggcgcttgagcaaatcgaccaggccgatgagcgggacacggcgcgggcggtggccgtgaaaaaggcgcgctcagagaccaagattccgcaggaccgcgccgactacgacaaagcgcttcggcgcgtggttggtgcgctggcacggcggggatttccggctggaatgtccatggaccttgcgcgggaagcgctagacgcgcgaatcgaggatttgaaaaactaaaccccggatgggaatcatcc

SEQ ID NO: 166 - protein, 199 aa, Corynebacterium glutamicum
MDIQAEKIEKLRKALDNFERAHARGESDFFDHEKEEKKANVRRRALLLLNQRARSVNELSTRLKALEFEEDIINEVIGDLTRSKLLDDEVFATEWVRQRAARRGKSSRALDRELQEKGVDKQTRAAALEQIDQADERDTARAVAVKKARSETKIPQDRADYDKALRRVVGALARRGFPAGMSMDLAREALDARIEDLKN

SEQ ID NO: 167 - DNA, 747 bp, Corynebacterium glutamicum
  CDS (101)..(724): RXS03098
gaccgttttgtcgatcgcaccgctgctggctcgcaccatcaacgagatcttcgaaaacggttccgtcaccaccctcttcgagggcgaggcctaaacacccatgcccaccacggacgtcttcaaccgcgtccggttggcattggaacctctagctgatcccgcacgtgccaccggaatggcaagctacatgcgggatcagttttcttttctcggcatcccatccacccccagaaaagaagcctgcaaacccgtgctgtccgcgctaaaagagttggacactgactttgtctcagactgctttggcgcagctgaacgggaataccagtatgtcgcctgcgatcacatcaatcgcgtcggcatcaccgatttaggttttgccaaagcattagtgcagaccaaatcctggtgggacaccgtcgattccctagcaaaaccgatcggcgccaaacacgatgatgatctgatgaaaacgtgggcgcttgatgaggacttctgggtgcgccgcatcgcgatcatccaccaactgggccgcaagaaaaacaccgacgctgccctgctggcctggatcatcgagcagaacctcggctccagcgagttcttcatcaacaaagcgatcggctgggcactgcgggatttcgcccgccacgaccccagctgggtccgggcttttgtcgacgccacggacctttccccactgagccggcgagaagccctgaagaatatttagccctcaggcatcatctgagc

SEQ ID NO: 168 - protein, 208 aa, Corynebacterium glutamicum
MPTTDVFNRVRLALEPLADPARATGMASYMRDQFSFLGIPSTPRKEACKPVLSALKELDTDFVSDCFGAAEREYQYVACDHINRVGITDLGFAKALVQTKSWWDTVDSLAKPIGAKHDDDLMKTWALDEDFWVRRIAIIHQLGRKKNTDAALLAWIIEQNLGSSEFFINKAIGWALRDFARHDPSWVRAFVDATDLSPLSRREALKNI

SEQ ID NO: 169 - DNA, 806 bp, Corynebacterium glutamicum
  CDS (1)..(783): RXS03175
gtccgcgcaagcgaaaaagacaccgccaccgcactgcaacccgccttagataacggatggcactacattggtgccccagcagctgccaagggacgtgccggtgtcggcattttgtctaggcatgaacttgaagatgtgaacatcggttttggatctttccttgactccggccgctacattgaagcaaccatcaaagacaccaccctggatgtgccagtaaccgtggcatctctttacctcccctcaggttcagcgggcaccgacaagcaggatgaaaagtaccgcttcctcgatgaattcgaagggttcctggaccagcgcgctaaagaacgctcccacatggtcatcggtggcgactggaacatctgccaccgccgcgaagacctgaaaaactggaaaaccaaccaaaagaaatccggtttccttcccgacgaacgcgcattcatggattcagtctttggcaccttcccagatgaggcaacccaggttgcaggggccggcgacttcttcggtgccgtggactatgaaggaacgaggcgtcgagaagcaactacggaccctgcgtggttcgacgttgcacgtcgcctgcaacctgaaggcgacggcccctacacttggtggacctaccgcggaaaagccttcgacaccggcgccggatggcgcatcgactaccaagcagcaaccgcagcgatgctcgaacgcgcagaacgctcctgggtagacaaagccgctgcatacgatttgcgctggtcagatcactcaccactgaacgtgatctactcctaaaatgctgctgacaattctat

SEQ ID NO: 170 - protein, 261 aa, Corynebacterium glutamicum
VRASEKDTATALQPALDNGWHYIGAPAAAKGRAGVGILSRHELEDVNIGFGSFLDSGRYIEATIKDTTLDVPVTVASLYLPSGSAGTDKQDEKYRFLDEFEGFLDQRAKERSHMVIGGDWNICHRREDLKNWKTNQKKSGFLPDERAFMDSVFGTFPDEATQVAGAGDFFGAVDYEGTRRREATTDPAWFDVARRLQPEGDGPYTWWTYRGKAFDTGAGWRIDYQAATAAMLERAERSWVDKAAAYDLRWSDHSPLNVIYS

SEQ ID NO: 171 - DNA, 1206 bp, Corynebacterium glutamicum
  CDS (101)..(1183): RXN03069
actatgcggaaaagtggaagagggtttgtgatatatgtcacgatcgaggaattggggagagatcgagaagttgcgctcggggaggtacagggcacgcttcatgcacgagggtaggcgatactctgccccgtataccttcggtaccaagggtgaggcgcaggagttcttggcctctgaacgcacggccatcatcaatggcacatggatggattttgagatgcgggagaggttcgagcaggcacagcgcgaagccgaagaacgcatgatggagaccttcttcagttatgcatcgaggtggatagaaacccggacaaatgcccaaggaaagaaactcagccaaggggtgaaagatgattactttcgttatataaaatcagatcgactaagttattgggctgattatgcgctctgtgaaatcactgtcgctgatgtccgtgagtggtatagcgatactattcaggacggtaaattgacctcaatggcgcggagttacagcatgatgaagtctgtcatggagactgcagtggaggatggcattatcccgatgaatccgtgcaaagtccgtggcgggggtaatacgaaaacaggcaaaaaggttgatgtcccaaccgatgccgagcttgaggcgatcattggtgcactgccgagtaagtacttttgtttggctattgttgctgccgctggtgcacttcgattcggtgaaatcgttgcgctgcgtaccactgatgtggatgtttattttgatcgcagcggatttgtagattgtgttcgaataaggatttctcggagcattaggcacacgagataccatggccgagttgaaggtccgcctaaaactgaagctggtgttcgtagcctctatatctatggcaaagatgcagcagaaattgccaagcatgtggacacgattgatgtgggtttgcgactatggagctcgatgagagatcctgatgaacccatgccgtatcacacctttaagcacaactgggatagggcgcgggaaagtgtccacagtaaagcgaccgttcactcgatgaggcattattcgggtacgaagtatgcacaggttggggcgacactcaaggaggtgatggcgcggctggggcactcaacacctagtgcagcactgcgttatcagcactcaggcgagcgtgatgaagagctagcaaagcgcatggcgcgctaaacactcggcagtgagtttca

SEQ ID NO: 172 - protein, 361 aa, Corynebacterium glutamicum
MHEGRRYSAPYTFGTKGEAQEFLASERTAIINGTWMDFEMRERFEQAQREAEERMMETFFSYASRWIETRTNAQGKKLSQGVKDDYFRYIKSDRLSYWADYALCEITVADVREWYSDTIQDGKLTSMARSYSMMKSVMETAVEDGIIPMNPCKVRGGGNTKTGKKVDVPTDAELEAIIGALPSKYFCLAIVAAAGALRFGEIVALRTTDVDVYFDRSGFVDCVRIRISRSIRHTRYHGRVEGPPKTEAGVRSLYIYGKDAAEIAKHVDTIDVGLRLWSSMRDPDEPMPYHTFKHNWDRARESVHSKATVHSMRHYSGTKYAQVGATLKEVMARLGHSTPSAALRYQHSGERDEELAKRMAR

SEQ ID NO: 173 - DNA, 1206 bp, Corynebacterium glutamicum
  CDS (101)..(1183): FRXA02890
actatgcggaaaagtggaagagggtttgcgatatatgccacgatcgacgaattgncgagagatcgaaaagttgcgctcgcggaggtacagggcacgcttcatgcacgagggtaggcgatactctgccccgcataccttcggtaccaagggtgaggcgcaggagttcttggcctctgaacgcacggccatcatcaatggcacatggatggattttgagatgcgggagaggttcgagcaggcacagcgcgaagccgaagaacgcatgatggagaccttcttcagttatgcatcgaggtggatagaaacccggacaaatgcccaaggaaagaaactcagccaaggggtgaaagatgattactttcgttatataaaatcagatcgactaagttattgggctgattatgcgctctgtgaaatcactgtcgctgatgtccgtgagtggtatagcgatactattcaggacggtaaattgacctcaatggcgcggagttacagcatgatgaagtctgtcatggagactgcagtggaggatggcattatcccgatgaatccgtgcaaagtccgtggcgggggtaatacgaaaacaggcaaaaaggttgatgtcccaaccgatgccgagcttgaggcgatcattggtgcactgccgagtaagtacttttgtttggctattgttgctgccgctggtgcacttcgattcggtgaaatcgttgcgctgcgtaccactgatgtggatgtttattttgatcgcagcggatttgtagattgtgttcgaataaggatttctcggagcattaggcacacgagataccatggccgagttgaaggtccgcctaaaactgaagctggtgttcgtagcctctatatctatggcaaagatgcagcagaaattgccaagcatgtggacacgattgatgtgggtttgcgactatggagctcgatgagagatcctgatgaacccatgccgtatcacacctttaagcacaactgggatagggcgcgggaaagtgtccacagtaaagcgaccgttcactcgatgaggcattattcgggtacgaagtatgcacaggttggggcgacactcaaggaggtgatggcgcggctggggcactcaacacctagtgcagcactgcgttatcagcactcaggcgagcgtgatgaagagctagcaaagcgcatggcgcgctaaacactcggcagtgagtttca

SEQ ID NO: 174 - protein, 361 aa, Corynebacterium glutamicum
MHEGRRYSAPHTFGTKGEAQEFLASERTAIINGTWMDFEMRERFEQAQREAEERMMETFFSYASRWIETRTNAQGKKLSQGVKDDYFRYIKSDRLSYWADYALCEITVADVREWYSDTIQDGKLTSMARSYSMMKSVMETAVEDGIIPMNPCKVRGGGNTKTGKKVDVPTDAELEAIIGALPSKYFCLAIVAAAGALRFGEIVALRTTDVDVYFDRSGFVDCVRIRISRSIRHTRYHGRVEGPPKTEAGVRSLYIYGKDAAEIAKHVDTIDVGLRLWSSMRDPDEPMPYHTFKHNWDRARESVHSKATVHSMRHYSGTKYAQVGATLKEVMARLGHSTPSAALRYQHSGERDEELAKRMAR

SEQ ID NO: 175 - DNA, 1035 bp, Corynebacterium glutamicum
  CDS (101)..(1012): RXA01601
gtgcgtctgcgcgtgccgtcaccgcgccgtttacctatcgccctacggcgttggcgcagcgtcgaaaagcgcacggcattgttcctgacatgaaaaaactatgaaggctcgcgttttagcgaaaacatggctgacacatttggccgtggagcgtggcttgtcggcaaatacgctgagtaattatcggcgcgatgtggaacgctattgcgactggctcgaggcagctgggctggatgatattcgtgatatcaccaccgcgcatgtggaaagttatgtcaaagacctgcgccgcgggattgatggacaacaagcgttgtctgcgtcctcggcaggtcgcgcgctcatcgtcgcgcgcgggttgcacaagtttgcattgatggagggcgaggtggctgcggacgttgcggctgatgtgtcgccaccggccatgggccggcatttacctgacacgctcagcatcaacgaggtagccctgcttatcgacgcgatcccacattcagatatcgccactcccgttgatctccgtgaccgagcgctggtggaattactttatggaactggcgcgcgtatctctgaggcgattgggctggcagttgatgatgtgtcggaaatgcctgaagttcttcgcatcacgggcaaaggttccaaacaacggatcgtgccttttggttcgatggcacaacaagcggtccgggaatatttggtcagagccagacccgcgttgagtaaggggaaaagccatgcgctttttctcaaccaacgcggcggtccgctatctcggcaatctgcgtgggcagtgctgaagaaaacggttgagcgcgcaggtttagataaagatatttctccccacaccctgcggcacagctttgccacccatctcctcgaaggtggcgccgatgtccgtgtggtgcaggaactcctgggtcattcttctgtgacgaccactcagatttacacgcacatcacagccgatagcttgcgggaagtgtggcgcggggctcatcctcgtgcgtgaaagcccttgcgaattcttaa

SEQ ID NO: 176 - protein, 304 aa, Corynebacterium glutamicum
MKARVLAKTWLTHLAVERGLSANTLSNYRRDVERYCDWLEAAGLDDIRDITTAHVESYVKDLRRGIDGQQALSASSAGRALIVARGLHKFALMEGEVAADVAADVSPPAMGRHLPDTLSINEVALLIDAIPHSDIATPVDLRDRALVELLYGTGARISEAIGLAVDDVSEMPEVLRITGKGSKQRIVPFGSMAQQAVREYLVRARPALSKGKSHALFLNQRGGPLSRQSAWAVLKKTVERAGLDKDISPHTLRHSFATHLLEGGADVRVVQELLGHSSVTTTQIYTHITADSLREVWRGAHPRA

SEQ ID NO: 177 - DNA, 339 bp, Corynebacterium glutamicum
  CDS (101)..(316): RXA01228
catgtccctcgtaccaatagttgttcctggcctgtcattgtgatggtcgaaggtcgacctgcagaagatcattgaccaaatcaccaccaagggtgcgagcgtgcacttcatcaaggaaaacctgatcttctcggcggaatccaatgctttgcgggcccagctcatgctgagcattctcggctccttcgctgagttcgaacgctccatcatccgggagcgccaagccgaggggatcgcctggcgaaaaaggccggcaagtacaagggccgcaaacgcgccctcaccccggacgacgtcgagaaagcccggaaacgggtagaagctggtgagtccaaggtg

SEQ ID NO: 178 - protein, 72 aa, Corynebacterium glutamicum
VHFIKENLIFSAESNALRAQLMLSILGSFAEFERSIIRERQAEGIAWRKRPASTRAANAPSPRTTSRKPGNG

SEQ ID NO: 179 - DNA, 1431 bp, Corynebacterium glutamicum
  CDS (101)..(1408): RXN03130
aacctgggctagcggtgtagacccgaaaataaacgagccttttgtcagggttaaggtttaggtatctaagctaaccaaacaccaacaaaaggctctacccatgaagtctaccggcaacatcatcgctgacaccatctgccgcactgcggaactaggactcaccatcaccggcgcttccgatgcaggtgattacaccctgatcgaagcagacgcactcgactacacctccacctgcccagaatgctcccaacctggggtgtttcgtcatcacacccaccggatgctcattgatttacccatcgtcgggtttcccaccaaactgtttatccgtctacctcgctaccgctgcaccaaccccacatgtaagcaaaagtatttccaagcagaactaagctgcgctgaccacggtaaaaaggtcacccaccgggtcacccgctggattttacaacgccttgctattgaccggatgagtgttcacgcaaccgcgaaagcacttgggctagggtgggatttaacctgccaactagccctcgatatgtgccgtgagctggtctataacgatcctcaccatcttgatggagtgtatgtcattggggtggatgagcataagtggtcacataatagggctaagcatggtgatgggtttgtcaccgtgattgtcgatatgaccgggcatcggtatgactcacggtgtcctgcccggttattagatgtcgtcccaggtcgtagtgctgatgctttacggtcctggcttggctcccgcggtgaacagttccgcaatcagatacggatcgtgtccatggatggattccaaggctacgccacagcaagtaaagaactcattccttctgctcgtcgcgtgatggatccattccatgttgtgcggcttgctggtgacaagctcaccgcctgccggcaacgcctccagcgggagaaataccagcgtcgtggtttaagccaggatccgttgtataaaaaccggaagaccttgttgaccacgcacaagtggttgagtcctcgtcagcaagaaagcttggagcagttgtgggcgtatgacaaagactacggggcgttaaagcttgcgtggcttgcgtatcaggcgattattgattgttatcagatgggtaataagcgtgaagcgaagaagaaaatgcggaccattattgatcagcttcgggtgttgaaggggccgaataaggaactcgcgcagttgggtcgtagtttgtttaaacgacttggtgatgtgttggcgtatttcgatgttggtgtctccaacggtccggtcgaagcgatcaacggacggttggagcatttgcgtgggattgctctaggtttccgtaatttgaaccactacattctgcggtgccttatccattcagggcagttggtccataagatcaatgcactctaaaacaggaagagcccgtaaac

SEQ ID NO: 180 - protein, 436 aa, Corynebacterium glutamicum
MKSTGNIIADTICRTAELGLTITGASDAGDYTLIEADALDYTSTCPECSQPGVFRHHTHRMLIDLPIVGFPTKLFIRLPRYRCTNPTCKQKYFQAELSCADHGKKVTHRVTRWILQRLAIDRMSVHATAKALGLGWDLTCQLALDMCRELVYNDPHHLDGVYVIGVDEHKWSHNRAKHGDGFVTVIVDMTGHRYDSRCPARLLDVVPGRSADALRSWLGSRGEQFRNQIRIVSMDGFQGYATASKELIPSARRVMDPFHVVRLAGDKLTACRQRLQREKYQRRGLSQDPLYKNRKTLLTTHKWLSPRQQESLEQLWAYDKDYGALKLAWLAYQAIIDCYQMGNKREAKKKMRTIIDQLRVLKGPNKELAQLGRSLFKRLGDVLAYFDVGVSNGPVEAINGRLEHLRGIALGFRNLNHYILRCLIHSGQLVHKINAL

SEQ ID NO: 181 - DNA, 489 bp, Corynebacterium glutamicum
  CDS (101)..(466): RXN01969
gcgtcgtggtttaagccaggatccgttgtataaaaaccggaattccttgttgaccacgcagaagtggtttagtcctcgtcagcaagaaagcttggagcagttgtgggcgtatgacaaagcctacggggcgttaaagcttgcgtggcttgcgtatcaggcgattattgattgttatcagatgggtaataagcgtgaagcgaagaagaaaatgcggaccattattgatcagcttcgggtgttgaaggggccgaataaggaactcgcgcagttgggtcgtagtttgtttaaacgacttggtgatgtgttggcgtatttcgatgttggtgtctccaacggtccggtcgaagcgatcaacggacggttggagcatttgcgtgggattgctctaggtttccgtaatttgaaccactacattctgcggtgccttatccattcagggcagttggtccataagatcaatgcactctaaaacaggaagagccacttaag

SEQ ID NO: 182 - protein, 122 aa, Corynebacterium glutamicum
LWAYDKAYGALKLAWLAYQAIIDCYQMGNKREAKKKMRTIIDQLRVLKGPNKELAQLGRSLFKRLGDVLAYFDVGVSNGPVEAINGRLEHLRGIALGFRNLNHYILRCLIHSGQLVHKINAL

SEQ ID NO: 183 - DNA, 1431 bp, Corynebacterium glutamicum; identical to SEQ ID NO: 179
  CDS (101)..(1408): FRXA00263

SEQ ID NO: 184 - protein, 436 aa, Corynebacterium glutamicum; identical to SEQ ID NO: 180

SEQ ID NO: 185 - DNA, 900 bp, Corynebacterium glutamicum
  CDS (101)..(877): RXN01541
ttgatacacccgatgatgaactagaggggttacctgtctataacctctcaggtgaacacctctacaaccatcatgagcatccagaaagcgcggaaatataatgaccacacctcactcccaccgcgcaccacgtctggcatccacggtcattattgcccgcgagtctgctgactcaggtaccttagaattctttatccagcagcgacaatccactatggcttatgcagcaaacgctgttgttttcccaggcggcggtgttgaggacagcgattatccctttatgctcccccaccgcgatcagcacatgtcgcctgaacacatcaagcatcatgccagccgactccacatggactcagaaactatggcagctcatatttccgctgcacgccgggaagtatgggaagaaacaggcgttgatctcggtaattacaaccatgaactcatcccgatcgaccgctggatcacacctgatattcctgcttttaggcgccgttacgacaccgccacctttgtacttattctaagcaaagacagcactaacgcagctctgcagcaccagcatcaaaccaccgaggccacccattcttattgggcaactgcagaagaactgctcactcaatggtcaacaggtcatctcaacctgttgttaccaacgtggtggcatatcaaccagctcaatcacctccacacgctaaaccagctgtatagctttgcccagcgtacccataatccgcagcacactccacccacagtgtttgctaactggactgcaccggctgatgaggccgccatgcagcactatgggttccctgatcccgatgcgtactttgaccatgccactatcgcaggaaaacaccacacactcatcacaagaaagtaggtctcaccatgacttttgca

SEQ ID NO: 186 - protein, 259 aa, Corynebacterium glutamicum
MTTPHSHRAPRLASTVIIARESADSGTLEFFIQQRQSTMAYAANAVVFPGGGVEDSDYPFMLPHRDQHMSPEHIKHHASRLHMDSETMAAHISAARREVWEETGVDLGNYNHELIPIDRWITPDIPAFRRRYDTATFVLILSKDSTNAALQHQHQTTEATHSYWATAEELLTQWSTGHLNLLLPTWWHINQLNHLHTLNQLYSFAQRTHNPQHTPPTVFANWTAPADEAAMQHYGFPDPDAYFDHATIAGKHHTLITRK

SEQ ID NO: 187 - DNA, 794 bp, Corynebacterium glutamicum
  CDS (1)..(771): FRXA01541
atttttaactcccaccgcgcaccacgtctggcatccacggtcattattgcccgcgagtctgctgactcaggtaccttagaattctttatccagcagcgacaatccactatggcttatgcagcaaacgctgttgttttcccaggcggcggtgttgaggacagcgattatccctttatgctcccccaccgcgatcagcacatgtcgcctgaacacatcaagcatcatgccagccgactccacatggactcagaaactatggcagctcatatttccgctgcacgccgggaagtatgggaagaaacaggcgttgatctcggtaattacaaccatgaactcatcccgatcgaccgctggatcacacctgatattcctgcttttaggcgccgttacgacaccgccacctttgtacttattctaagcaaagacagcactaacgcagctctgcagcaccagcatcaaaccaccgaggccacccattcttattgggcaactgcagaagaactgctcactcaatggtcaacaggtcatctcaacctgttgttaccaacgtggtggcatatcaaccagctcaatcacctccacacgctaaaccagctgtatagctttgcccagcgtacccataatccgcagcacactccacccacagtgtttgctaactggactgcaccggctgatgaggccgccatgcagcactatgggttccctgatcccgatgcgtactttgaccatgccactatcgcaggaaaacaccacacactcatcacaagaaagtaggtctcaccatgacttttgca

SEQ ID NO: 188 - protein, 257 aa, Corynebacterium glutamicum
IFNSHRAPRLASTVIIARESADSGTLEFFIQQRQSTMAYAANAVVFPGGGVEDSDYPFMLPHRDQHMSPEHIKHHASRLHMDSETMAAHISAARREVWEETGVDLGNYNHELIPIDRWITPDIPAFRRRYDTATFVLILSKDSTNAALQHQHQTTEATHSYWATAEELLTQWSTGHLNLLLPTWWHINQLNHLHTLNQLYSFAQRTHNPQHTPPTVFANWTAPADEAAMQHYGFPDPDAYFDHATIAGKHHTLITRK

SEQ ID NO: 189 - DNA, 1059 bp, Corynebacterium glutamicum
  CDS (101)..(1036): RXA02590
gccccaaaggcttaaagtaatgggcatgcccactccttcttcgaccaaaagctacgctgcggtcttacctccacctggcccctcgtgggctggttccctcatgggcatctcattgttgtcatcactgttgaaaatccatggttttccagtcgtcgcagatttcttcttcgcgttagctgttgtggtggcaattgtcattattggcggttggctaatctaccgctctccttcattcaaaactgaagtcatgccggcatgggcaatgctgtccatgggtttgatcgcattgggaactgcaagccccgtagttttgggtgatgatctgtggggatttatgtttgtgtgctggtctattggcacagccgtgggacttgttgcctattccttatatataacggccattttgcgatctaaggcgggcacaccaacttttgcgtggggtcttcctcttgtcacgccgatggttgcttccacctcggcagcacaactccatgagcactttgaacttccggcgatgctgtgggtttctttcgggctcttccttttaactttggcgtctgcaccagcagtttttacccgagtgtatttctactatttcggccccaaggcgcagggcatcccactgatggcaacaccaacatcatggattcctttgggtatggtgggccaatccactgcagcagctcagctcatcggtgcgtcctttggatccaagacagcaatcacaatgggcattatttacggcatcatcatgggaatttttacgattcctctgggagccatcgctcactttgtgttctacagagctgttttcaaaggggcgacatacagccccacatggtgggccagtaccttcccagttggcactttgagtttgggtgcgcattttttatcacagagcaccggagtggagtggtttaactacttcagcctgtacttgattgctttaatgctctttcatgtcatcgtgtccaccatcgccggtacgattgcagtaatgagaagaatcgtcggaaagcttaaatctcaactggcctaaattgcagcgagaggtctaaa

SEQ ID NO: 190 - protein, 312 aa, Corynebacterium glutamicum
MGISLLSSLLKIHGFPVVADFFFALAVVVAIVIIGGWLIYRSPSFKTEVMPAWAMLSMGLIALGTASPVVLGDDLWGFMFVCWSIGTAVGLVAYSLYITAILRSKAGTPTFAWGLPLVTPMVASTSAAQLHEHFELPAMLWVSFGLFLLTLASAPAVFTRVYFYYFGPKAQGIPLMATPTSWIPLGMVGQSTAAAQLIGASFGSKTAITMGIIYGIIMGIFTIPLGAIAHFVFYRAVFKGATYSPTWWASTFPVGTLSLGAHFLSQSTGVEWFNYFSLYLIALMLFHVIVSTIAGTIAVMRRIVGKLKSQLA

SEQ ID NO: 191 - DNA, 1017 bp, Corynebacterium glutamicum
  CDS (101)..(994): RXA00016
ctgaacggatccgccaacttgaaaaggaaaatgcactcctccgcgaagagcgtgacatcctgcggaaagcggccaaatatttcgcggaagagacgaactggtgatccgcttccgattcgttgatgacgctcgaaagacctactcggttaagcggatatgtgacgtgttgaagctcaatcgttcctcatattacaaatggaaaagcaccgccttcacgcgtgaaaaacgcctgctcagcgacgctattcttggggtccaggtcaagactgtattcaccactcacagtggctgttatggggccaaacgaatcgcggctgaactcaaagaccagatcggccatgaccttgcgaaccacaagcgggttgcccggatcatgcgatcgttgaagctgttcggatacacaaagaaacgcaaggtcaccaccaccgtgccggacaaaaccaagacagtgttccctgaccttgtcggccggaagttcaccgctgacaagccgaaccagctctatgtcggggatatcacctatctgccaattcaggatgggtcgaatatgtacctggccacggtcattgactgttactcccgcaggttggtgggcttttctatcgcagatcacatgcgcacgagcttggtccaggacgcgctgctcatggctaaagaccagcgtggaaacctcaaaggtgcgatttttcactccgaccacggcagcgtttacacgtctcatgcgtttcaggagacgtgtaagaaactagggatcaggcagtcgatgggatcaattggcaccagtgctgacaacgctttggcggagtctttcaatgccgcgatgaagcgggaagtcctgcaggattccaagacctttgaaaatcaattgtgctgtcgccgggacgtcttccgctggtgtacccgttacaacacggttcgccggcattcctggtgtagatatctggctccggtcgtgtttgaggagcgcggtcctgctatcctgagatctgcttcctgatcaaatcctccgtgtccacc

SEQ ID NO: 192 - protein, 298 aa, Corynebacterium glutamicum
VIRFRFVDDARKTYSVKRICDVLKLNRSSYYKWKSTAFTREKRLLSDAILGVQVKTVFTTHSGCYGAKRIAAELKDQIGHDLANHKRVARIMRSLKLFGYTKKRKVTTTVPDKTKTVFPDLVGRKFTADKPNQLYVGDITYLPIQDGSNMYLATVIDCYSRRLVGFSIADHMRTSLVQDALLMAKDQRGNLKGAIFHSDHGSVYTSHAFQETCKKLGIRQSMGSIGTSADNALAESFNAAMKREVLQDSKTFENQLCCRRDVFRWCTRYNTVRRHSWCRYLAPVVFEERGPAILRSAS

SEQ ID NO: 193 - DNA, 573 bp, Corynebacterium glutamicum
  CDS (101)..(550): RXA00265
tgggctcaccaggcttccagcacccgagcttcccaacgctgctatcaaggcacgtaaaaacccagcaccaactgcacgaccagaaacgagaattgattaaatgcgctccgctcacggcccatacattgataagttcttccccgagccatacaagaacatgctcgagctcaccaagactctgcgaaagatctacccggacgttgatctgcctacctcattgattgagctggtcaatgtccgcgtttctcaaatcaacggatgtggcacctgcttaagtttacatgttcccgctgctcgccgtgccggcgttccagagaagaaactcgatgctctggcagcgtggcaaatggtggatgaattcaccgtggaggaaaaggcagcactacagctagcagaatccttaaccttgctggaatcccgcgaaggtcacctggctgcacgcacagcctgcagtgtgtttgccgaagagcaggtagctgccctggaatgggctatcattgcgatcaatgctttcaaccgcatttctattgccagtgggcacccactgctctagtaatcaggcagcaaaaaact

SEQ ID NO: 194 - protein, 150 aa, Corynebacterium glutamicum
MRSAHGPYIDKFFPEPYKNMLELTKTLRKIYPDVDLPTSLIELVNVRVSQINGCGTCLSLHVPAARRAGVPEKKLDALAAWQMVDEFTVEEKAALQLAESLTLLESREGHLAARTACSVFAEEQVAALEWAIIAINAFNRISIASGHPLL

SEQ ID NO: 195 - DNA, 381 bp, Corynebacterium glutamicum
  CDS (101)..(358): RXA00938
atgatctaccgctgggtccagaaatacgcccctgagctggacaagcaaacacggtggtaccggcaggtgcctgactggcaggccagttcctggcgggtggatgagacctatatccgggtcggcggcaggtggtgctacctctgatctggcgatcaccgccggtggccagaccctggacttttacctctctccgaagcggaacgtggccgcagcgaagcgtttcctggccaaggccctcagatccaatgcgtcagccgggtatcccagagtgatcaacaccgataaagcaccctccctagccagggcaatcaccgagttgaagtcagagggaatctgcccgccaacagtggaacaccggtaggtgaaatacctcaacaacat

SEQ ID NO: 196 - protein, 86 aa, Corynebacterium glutamicum
MRPISGSAAGGATSDLAITAGGQTLDFYLSPKRNVAAAKRFLAKALRSNASAGYPRVINTDKAPSLARAITELKSEGICPPTVEHR

SEQ ID NO: 197 - DNA, 339 bp, Corynebacterium glutamicum
  CDS (101)..(316): RXA01264
atcaagacatgattgcggcgtatgggaatccgtagaaatcagaggaaaagaagctgatgagaaggggatcaacagcctgcgcaaaggcctaccagcgagaatggacgagcttgcccaactggggcacaccttgtggcgtcggcgtaagaacgtgttggcgtccttcaatatcggtgcatccaacggacctgtcgaggccatcaacggcagacttgagcacctgcgcgggatcaccttggggttcaggaacctcaaccactacatcttgcggtgcttgatccaagccggacaactgcagaggaagatcaatgtactctaaatccgaagagttggcaaaga

SEQ ID NO: 198 - protein, 72 aa, Corynebacterium glutamicum
MDELAQLGHTLWRRRKNVLASFNIGASNGPVEAINGRLEHLRGITLGFRNLNHYILRCLIQAGQLQRKINVL

SEQ ID NO: 199 - DNA, 273 bp, Corynebacterium glutamicum
  CDS (101)..(250): RXA01265
tacgaggaagatcttccacaaatcctgtactgcgcggatgactgatccaagttcaaccaccggggcactgctagatcttgcagcgcttggtgattgacggatgagtgtgtctgccacggctaaagcactgaagatcggctgggaactagtcaaccaggttgcactcgatgcttgccgacagctcatttacaacgacccgcgccaccttgaagtcgatgaacatgtatggaagtatactcgaaagccaggttagccgtcgaacctggtgaccat

SEQ ID NO: 200 - protein, 50 aa, Corynebacterium glutamicum
MSVSATAKALKIGWELVNQVALDACRQLIYNDPRHLEVDEHVWKYTRKPG

SEQ ID NO: 201 - DNA, 267 bp, Corynebacterium glutamicum
  CDS (101)..(244): RXA01327
gaaatccaaatatcctctacgaacgcaatggtcacacagttttcaaactcgaaatcgccttattcgacaacatcgattgtaacgcctcgacatcgaccgtatgagtatcgcagcaaccgcgaaagccctcggtctaggctgggatctcacctgccaactagccctagatatgtgccacgaactcatctactacgaccccacccacctagaaattgtgcacgttattggcgtcgatgagcacaaatgatctcataaccgattaaaaca

SEQ ID NO: 202 - protein, 48 aa, Corynebacterium glutamicum
MSIAATAKALGLGWDLTCQLALDMCHELIYYDPTHLEIVHVIGVDEHK

SEQ ID NO: 203 - DNA, 498 bp, Corynebacterium glutamicum
  CDS (101)..(475): RXA01328
cacaaatgatctcataaccgattaaaacatggtgatggctatgtcaccgtcattgttaatatgaccagccttccaccgcgatgccacgtccccagcgaggttgcttgatgtagtcgaaggccgcagtgctgatgcgttgcgggcgtggcttgcacgccgaagcccagcatttcgacaccaagtacgcattgtaactatggatggattccaaggctatgccacaaccagcaaacaacttctgcccgccgcacgccgagtcatggatcctttccacgtggtactcctcgccggcgataaactcacccgatgccgacaacgtttgcagcaggaaaaataccaccggcggggtttgcatgatgacccgttgtataagaaccggaaaaccttgctgaccacgcaaaaatggttgagtaagaaaaagcaaagcgtcttgatgagttgtttagctttgataaagactacgcggcactgcaactgatgtggcaggcgtatcaaggc

SEQ ID NO: 204 - protein, 125 aa, Corynebacterium glutamicum
LLDVVEGRSADALRAWLARRSPAFRHQVRIVTMDGFQGYATTSKQLLPAARRVMDPFHVVLLAGDKLTRCRQRLQQEKYHRRGLHDDPLYKNRKTLLTTQKWLSKKKQSVLMSCLALIKTTRHCN

SEQ ID NO: 205 - DNA, 414 bp, Corynebacterium glutamicum
  CDS (101)..(391): RXA01329
aaaagcaaagcgtcttgatgagttgtttagctttgataaagactacgcggcactgcaactgatgtggcaggcgtatcaaggcattattgactgatacaacatggccgataaacgccgcgcaaagaccatgatgcgcgagattgttgaccagatgcggctactgaaaggacaagcgaatcgagaacttgcacaactaggccgcagcctacacaaacgcctcggtgacatcctggcgtatttcgatgtcggaatctctaacggacccgtagaagcaatcaacggacgactcgaacacctccgcggaatcgccctaggatttcgcaacctcaaccactacatcctgcactgtctcatccactccggacaactcacccacaaaatcaacgcactctaaaaccggaagagcccgattgc

SEQ ID NO: 206 - protein, 97 aa, Corynebacterium glutamicum
MADKRRAKTMMREIVDQMRLLKGQANRELAQLGRSLHKRLGDILAYFDVGISNGPVEAINGRLEHLRGIALGFRNLNHYILHCLIHSGQLTHKINAL

SEQ ID NO: 207 - DNA, 954 bp, Corynebacterium glutamicum
  CDS (101)..(931): RXA01443
gaaagctgctaaatatttcccggcaagagacaaactggtgagctgcttccggtttgttgacgacgtgcgaaaaacctatccggttaagcggttatgcgaagtgttgaaaatcaaccgctcctcgtactacaaatggaaaaagactgccccgaccaggagcaaccgcctgctcagcgacgcagtcttaggagcgaagatcaagtccatcttcacgaaagaacgcggctgctacggctcaaaacgcatcacggctgagctcaacgatgatcctggcagcactccggttaaccataaacgagtcgcccggatcatggcatcattaaagctgtttggtttcacgaagaaacgcagggtcatcacgaccgtgtctgataaaaagaagcctgtcttccctgacctggtcaaacgtcattttaacgcactagcagcaaatgaagtttacgtcggggatattacttacctaccgatcgcagatggcacgaacatgtatctggctacggtcattgattgctattcccgtaggctggtgggttttgcgattgcggatcatatgcgcacgtcattggtgcaggaggcattgctgatggcgaagagtcagcgaggcagcctgaagggtgcggtgtttcattcggatcacggcagtgtgtacacctcgcaggcgtttcaggacacttgtaaaaagttgggtgttcgtcagtcgatgggtgctgttggtaccagtgcggataattcgctggcggagtcgtttaatgccgccctcaagcgagaggtgctgcaggattccaagacgtttgccaatcagttggtgtgccgccgggaggtatttcgctggtgtaccaggtacagcacaaatcgcaggcattcttggtgtggctatgtggtgcctgcggtgttcgagagtagaaatttagctattctgaaatctgtttcctgattaaatcgcctgtgtttcca

SEQ ID NO: 208 - protein, 277 aa, Corynebacterium glutamicum
VLKINRSSYYKWKKTAPTRSNRLLSDAVLGAKIKSIFTKERGCYGSKRITAELNDDPGSTPVNHKRVARIMASLKLFGFTKKRRVITTVSDKKKPVFPDLVKRHFNALAANEVYVGDITYLPIADGTNMYLATVIDCYSRRLVGFAIADHMRTSLVQEALLMAKSQRGSLKGAVFHSDHGSVYTSQAFQDTCKKLGVRQSMGAVGTSADNSLAESFNAALKREVLQDSKTFANQLVCRREVFRWCTRYSTNRRHSWCGYVVPAVFESRNLAILKSVS

SEQ ID NO: 209 - DNA, 390 bp, Corynebacterium glutamicum
  CDS (101)..(367): RXA01444
ttttacccaccttccctgtttgtcgttaaagggacctggcccctgtttggtagacacctaacatcccaacattctgggatagaaaggtaacctaccgatcatgccaaccaagacctattccgaggagttcaaacgcgacgccgttgctttgtacgagaactccgacggggcctcactccaacagatcgccaacgatctcggcatcaaccgagtaaccctgaaaaactggatcatcaaatacggatccaaccacaacgtacaagggacaaccccatctgcggcagtctctgaagctgaacaaatccggcagctgaagaaggaaaacgcgctacaacgcgcaagaacgcgacatcctgcggaaagctgctaaatatttcccggcaagagaca

SEQ ID NO: 210 - protein, 89 aa, Corynebacterium glutamicum
MPTKTYSEEFKRDAVALYENSDGASLQQIANDLGINRVTLKNWIIKYGSNHNVQGTTPSAAVSEAEQIRQLKKENALQRARTRHPAESC

SEQ ID NO: 211 - DNA, 492 bp, Corynebacterium glutamicum
  CDS (101)..(469): RXA01648
ccaatgaagtttacgtcggggatattacttatctgccgattgctgatgggtcgaatatgtatttgacgacggtcattgattgctattcttagcacggttggtgggttttgcctttgcggatcatatgcgcacgtcattggtgcaggaggcgttgatgatggcgaagagtcagcgaggcagtctacagggtgctgtttttcattcggatcacggcagtgtgtacacctcgcaggcgtttcaggacacttgtaaaaagttgggtgttcgtcagtcgatgggtgctgttggtaccagtgcggataattcgctagcggagtcgtttaatgccgcgctcaagcgggaagtgctgcaggattccaagacgtttgctaatcagttggtgtgccgtcgggaggtatttcggtggtgtgacctagtacaacacggtgcgcagacattcttggtgtggctatgtggcgcctgcggtgtttgaggtccagggttctgctattc

SEQ ID NO: 212 - protein, 123 aa, Corynebacterium glutamicum
VGFAFADHMRTSLVQEALMMAKSQRGSLQGAVFHSDHGSVYTSQAFQDTCKKLGVRQSMGAVGTSADNSLAESFNAALKREVLQDSKTFANQLVCRREVFRWCDLVQHGAQTFLVWLCGACGV

SEQ ID NO: 213 - DNA, 543 bp, Corynebacterium glutamicum
  CDS (101)..(520): RXA01649
ggctgctaaatattttcccggcaagaggcaagacttatgacccgcttctggtttgttgacgacgtgcgaaaaacctactgaagttaagcggttatgcgaagtgttgaaaattaaccgttcctcgtattacaaatggaaaaagactgctctgacgaggaagaaactcctgctcagcgacgcagtcctgggagcgaagatcaagtccatcttcactaaagaacgcggctgttatggtgcgaaacgtattacggccgagcttaatgacgggccaggtacaacaactccggttaaccacaagcgagtcgctcgagtgatgtcttcgatgaagcttgttggttttacgaagaaacgcaaggtcatcaccacaatcccagcagctgtcaagccggtgttcccggacttggtgaagcgtcaattcaacgctttggctgccaatgaagtttacgtcggggatattacttatctgccgattgctgatgggtcgaatatgtatttgacgacggtcattgattgctattcttagcacggttggtgggttttgcc

SEQ ID NO: 214 - protein, 140 aa, Corynebacterium glutamicum
VLKINRSSYYKWKKTALTRKKLLLSDAVLGAKIKSIFTKERGCYGAKRITAELNDGPGTTTPVNHKRVARVMSSMKLVGFTKKRKVITTIPAAVKPVFPDLVKRQFNALAANEVYVGDITYLPIADGSNMYLTTVIDCYS

SEQ ID NO: 215 - DNA, 237 bp, Corynebacterium glutamicum
  CDS (101)..(214): RXA01650
cagatcgccaacgatctcggcatcaaccgagtaaccctgaaaaacttcgatcaataaatacggtgcgcatgcctcaaccaacaccaaagaagcaacagcaatgtcggaagctgaacaaatcagacagctaaagaaggaaaacgcactactgcgtgaagaacgcgacattttgcgcaaggctgctaaatattttcccggcaagaggcaagacttatgacccgcttctggtttgttgac

SEQ ID NO: 216 - protein, 38 aa, Corynebacterium glutamicum
MSEAEQIRQLKKENALLREERDILRKAAKYFPGKRQDL

SEQ ID NO: 217 - DNA, 258 bp, Corynebacterium glutamicum
  CDS (101)..(235): RXA01651
caatctctaaggagaaagtttatgacaaataggacctgacccctgtttggtagacacctaacatcccaacattctgggacagaaaggtaacctacctatcatgccaaccaagacctactccgaggagttcaaacgcgacgccgttgctttgtacgagaactccgatggggcctcactccaacagatcgccaacgatctcggcatcaaccgagtaaccctgaaaaacttcgatcaataaatacggtgcgcatgcctcaa

SEQ ID NO: 218 - protein, 45 aa, Corynebacterium glutamicum
MPTKTYSEEFKRDAVALYENSDGASLQQIANDLGINRVTLKNFDQ

SEQ ID NO: 219 - DNA, 534 bp, Corynebacterium glutamicum
  CDS (101)..(511): RXN01680
aagagttctacctcacctacggggactggcttaacgaacgcacctaccgcgctgatgtaccagcacatgccatcccgaaacatatccgccccaatcagaaatggcaggtcacacccacaaaacccaccggactgcttataagcagttggaagccttggcccgcaatgggcatttgtttacctatattgatccaccagcagaggttgacggggtggtgaaatcaacaacgaactgtttggaaggtggtatcaacgctcagattaaagcgttggcgagaaaccatcgggggatgtttgatgaacatcaacgtatcgcggtggattggtggttattgatgcatacgcagttgcctggcgatccggttgagatcgccaggcaacaaaactggggtcaagacggactcgccaacgtccccgacttgatccaacaagaacaaccacacgaccactacgggcgcccggttacctatgacaccggaatcgatgccacaacgacacgccgtaaaagcaagtaaaaatcccggcccaccaacaa

SEQ ID NO: 220 - protein, 137 aa, Corynebacterium glutamicum
MAGHTHKTHRTAYKQLEALARNGHLFTYIDPPAEVDGVVKSTTNCLEGGINAQIKALARNHRGMFDEHQRIAVDWWLLMHTQLPGDPVEIARQQNWGQDGLANVPDLIQQEQPHDHYGRPVTYDTGIDATTTRRKSK

SEQ ID NO: 221 - DNA, 534 bp, Corynebacterium glutamicum
  CDS (101)..(511): FRXA01680
aagagttctacctcacctacggggactggcttaacgaacgcacctaccgcgctgatgtaccagcacatgccatcccgaaacatatccgccccaatcagaaatggcaggtcacacccacaaaacccaccggactgcttataagcagttggaagccttggcccgcaatgggcatttgtttacctatattgatccaccagcagaggttgacggggtggtgaaatcaacaacgaactgtttggaaggtggtatcaacgctcagattaaagcgttggcgagaaaccatcgggggatgtttgatgaacatcaacgtatcgcggtggattggtggttattgatgcatacgcagttgcctggcgatccggatgagatcgccaggcaacaaaactggggtcaagacggactcgccaacgtccccgacttgatccaacaagaacaaccacacgaccactacgggcgcccggttacctatgacaccggaatcgatgccacaacgacacgccgtaaaagcaagtaaaaatcccggcccaccaacaa

SEQ ID NO: 222 - protein, 137 aa, Corynebacterium glutamicum
MAGHTHKTHRTAYKQLEALARNGHLFTYIDPPAEVDGVVKSTTNCLEGGINAQIKALARNHRGMFDEHQRIAVDWWLLMHTQLPGDPDEIARQQNWGQDGLANVPDLIQQEQPHDHYGRPVTYDTGIDATTTRRKSK

SEQ ID NO: 223 - DNA, 705 bp, Corynebacterium glutamicum
  CDS (101)..(682): RXN01784
gggcatcttctccggtcggcatttccctcgcgagatccatcctgtgggcggtgcggtggtactgccgctacggggtgagctgacctaagatctcgaagagatgatgactgaacgtggtgtgccagtcgatcacaccaccatctaccgctgggtccagaaatacgcccttgagctggataagcagactcgctggtaccggcaggttcctgactggcaggccagttcctggcgggtggatgagacctatatccgggtcggcggcacgtggtgctatctctaccgggctattaccgcgggtgggcagaccctggagttttatctctcaccaaaacggaatgtggctgcggccaagcgtttcctggccaagacgctgcgatcgaatacgacagccgggtccccgcgggtcatcaacaccgacaaggcaccagctctggccaaggcaatatccgagctgaaggcggagggaatctgccctcagacggtggagcaccggcaggtgaaatacctcaacaacgttatcgagggagatcatggccgacttaaaagaatcctggggccgaagggagcgttcaaaaaccgaatttccgcctaccggacgttgaaagggatggaagcgatgcattcattacggaaaggccagggcacgatgtttgacctcacgggcacccgaacccagacgcggtgatcgtcagccggatattcgag

SEQ ID NO: 224 - protein, 194 aa, Corynebacterium glutamicum
MMTERGVPVDHTTIYRWVQKYALELDKQTRWYRQVPDWQASSWRVDETYIRVGGTWCYLYRAITAGGQTLEFYLSPKRNVAAAKRFLAKTLRSNTTAGSPRVINTDKAPALAKAISELKAEGICPQTVEHRQVKYLNNVIEGDHGRLKRILGPKGAFKNRISAYRTLKGMEAMHSLRKGQGTMFDLTGTRTQTR

SEQ ID NO: 225 - DNA, 572 bp, Corynebacterium glutamicum
  CDS (1)..(549): FRXA01784
accaccatctaccgctgggtccagaaatacgcccttgagctggataagcagactcgctggtaccggcaggttcctgactggcaggccagttcctggcgggtggatgagacctatatccgggtcggcggcacgtggtgctatctctaccgggctattaccgcgggtgggcagaccctggagttttatctctcaccaaaacggaatgtggctgcggccaagcgtttcctggccaagacgctgcgatcgaatacgacagccgggtccccgcgggtcatcaacaccgacaaggcaccagctctggccaaggcaatatccgagctgaaggcggagggaatctgccctcagacggtggagcaccggcaggtgaaatacctcaacaacgttatcgagggagatcatggccgacttaaaagaatcctggggccgaagggagcgttcaaaaaccgaatttccgcctaccggacgttgaaagggatggaagcgatgcattcattacggaaaggccagggcacgatgtttgacctcacgggcacccgaacccagacgcggtgatcgtcagccggatattcgag

SEQ ID NO: 226 - protein, 183 aa, Corynebacterium glutamicum
TTIYRWVQKYALELDKQTRWYRQVPDWQASSWRVDETYIRVGGTWCYLYRAITAGGQTLEFYLSPKRNVAAAKRFLAKTLRSNTTAGSPRVINTDKAPALAKAISELKAEGICPQTVEHRQVKYLNNVIEGDHGRLKRILGPKGAFKNRISAYRTLKGMEAMHSLRKGQGTMFDLTGTRTQTR

SEQ ID NO: 227 - DNA, 1329 bp, Corynebacterium glutamicum
  CDS (101)..(1306): RXA01862
tctcacagtaatgtggatgccagcacaagtatgtccgaccaccccagcgatgaagcgtaaataatccaactccctactcatcgctaggaggcacagactcatggcctatgacttcgtcattggaatggacgtcggcaaatacttccaccacgcctgcgtcctcgatccccagggcagacaagtcctatccaaacgcatcaaccaacacgaaggctcgctacgcaagctcttcgacaaattcctggccaatgacgccgaggtccttgtcgtcgtcgatcagcccaacaacatcggcaggctaaccgtcgcagtcgcccaagcaatgggagccgacgttcgctacctccccgggcttgccatgcgacaactttcacgtatccacgtcggcaactccaagaccgatgtacgggacgcttatgtcatcgcccatgccggcctcaaccttccggatgccctgcgtagcgtcgaccgcgttgaggaagtcttcctccagctgaaagtcctcaacggtatcgacgaagacctcgcccgcgcctacacacgcctgatcaaccagatgcaatccgcgctcgtgggcacctaccccgcattcgaacatgtcctgcgtgggcagatgattcaccgcaagtggattctccaccttctggcgaaatacggtggccccaccaagattcgacgcgtcggcaaagcacggctggcagctttcgcacgtggtcacagggcacgtaatcctgagccagttatcgatgccatgcttgctgcgatccacggccagacggtatccatcgccggcgcagaatacgcggaacttggcgtagcaatgtccgccaaagatgcactagccaagctggagcaccgcaaagagattgaaggccaggtactcgagctgatccaggacattcctcagaccgagattctcttgtccatgcccggcatcggcccacgtagcgccgcgcaaatccttatgaccgtcggcgatatgtccgactttcccgatgcagcgcacctggcgtcctatgcaggcctgtcgccgcagacaaatcagtcgggaacgtcgatcatgtcgaattcgcccaaccgggccggcaacaagaaattgaagaacgccctatggcagtcgtcttttgcatcgatcagattccacgagcgttcccggcaattctatgaacgaaaacgcaacgaaggcaaaagacacaacgccgcagtcgtcgcgctcgcacgccgacgcctcaacgtcctcttcgccatgatgcgcagcggagagctctacagagacatccccacagcccaggaggccgcagcggcctagcccctacaagccccgaagcc

SEQ ID NO: 228 - protein, 402 aa, Corynebacterium glutamicum
MAYDFVIGMDVGKYFHHACVLDPQGRQVLSKRINQHEGSLRKLFDKFLANDAEVLVVVDQPNNIGRLTVAVAQAMGADVRYLPGLAMRQLSRIHVGNSKTDVRDAYVIAHAGLNLPDALRSVDRVEEVFLQLKVLNGIDEDLARAYTRLINQMQSALVGTYPAFEHVLRGQMIHRKWILHLLAKYGGPTKIRRVGKARLAAFARGHRARNPEPVIDAMLAAIHGQTVSIAGAEYAELGVAMSAKDALAKLEHRKEIEGQVLELIQDIPQTEILLSMPGIGPRSAAQILMTVGDMSDFPDAAHLASYAGLSPQTNQSGTSIMSNSPNRAGNKKLKNALWQSSFASIRFHERSRQFYERKRNEGKRHNAAVVALARRRLNVLFAMMRSGELYRDIPTAQEAAAA

SEQ ID NO: 229 - DNA, 504 bp, Corynebacterium glutamicum
  CDS (101)..(481): RXA01953
gcatatcagcagcagtatggattagcagcagcgtaagaagaaaaatcaatcaagctgtctcaaaaacttgacgagcgcaacctgggggatctaccagcggatgatcgcggcctaccgcgagaaggaccgatccctcggccgcgcggcgatggaggcgctcatcgacgccgtcagccaagacgtccccgccgggctggacgagttgcgcaagctcggtcggaccctgaaggctcgcgccaccgacgtgctggcctacttcgagcggcctggcaccagcaatggccccacagaggcgatcaacggacgcctggagcacctgcgcggctcggccctgggcttccgcaacctgaccaactacatcgccagatccctgctcgagttccggcggattcagacctcaactacaccctcatctgtgaagagccgctttagacatccctcatcgtcacggaccactatgaacgatgtcccgactcacctatgaacgatgtcctgaacctacac

SEQ ID NO: 230 - protein, 127 aa, Corynebacterium glutamicum
MIAAYREKDRSLGRAAMEALIDAVSQDVPAGLDELRKLGRTLKARATDVLAYFERPGTSNGPTEAINGRLEHLRGSALGFRNLTNYIARSLLEFRRIQTSTTPSSVKSRFRHPSSSRTTMNDVPTHL

SEQ ID NO: 231 - DNA, 831 bp, Corynebacterium glutamicum
  CDS (101)..(808): RXA01998
aaccatcatcttggagttcagggtcacctgcaggataacctaaaacggtgctgttgcaaagttggggcagtaggaagaccggcgtggaataatcaggtccatgggcatcttctccggtcggcagttccctcgtgaaatcatcctgtgggcggtgcggtggtactgccgctacggcgtgagctatcgcgacctcgaagagatgatgaccgagcggggagtgccggtcgatcacaccacgatctaccgctgggtccagaaatatgctcctgagctggataagaagacccggtggtatcggcaagttcctgactggcaggccaggtcctggcgggtggatgagacctatatccgggtcgggggaaagtggtgctacctctatcgggcaatcaccgccggtagccagaccctggacttctacctctccccgaagagaaacgtcgcggcggcgaagcgtttcctggcgaagacgctgcggtcgaataaatcggcaggctatccgcgggtgatcagcaccgacaaggccccctcactcgccagggcaatctctgagctgaaggcggaaggcgtctgtccatcgacggtcgagcatcgtcgggtgaaatacctcaacaacgtcattgaaggcgaccatggtcggttaaagcggatcctggggccgaaaggcgcattcaaaaaccgaacgtctgcctaccggacgttgaaagggatggaggcgatgcactcattgcggaaggggcagggcacgatgtttgcctatggtcacccgaatccggatgcagtgattgttagccgggtattcgagacggcctgacaacacaggcacatagcgtt

SEQ ID NO: 232 - protein, 236 aa, Corynebacterium glutamicum
MGIFSGRQFPREIILWAVRWYCRYGVSYRDLEEMMTERGVPVDHTTIYRWVQKYAPELDKKTRWYRQVPDWQARSWRVDETYIRVGGKWCYLYRAITAGSQTLDFYLSPKRNVAAAKRFLAKTLRSNKSAGYPRVISTDKAPSLARAISELKAEGVCPSTVEHRRVKYLNNVIEGDHGRLKRILGPKGAFKNRTSAYRTLKGMEAMHSLRKGQGTMFAYGHPNPDAVIVSRVFETA

SEQ ID NO: 233 - DNA, 274 bp, Corynebacterium glutamicum
  CDS (101)..(274): RXA02837
tcatgatcgatgccacccatctgaaagcacatcgcacggcgtccagcttgcgtttgaaaaagaggggcgaggtcgcctgattggtcggacgaagggtgaaatgaacaccaagctccatgctgtgaccgatgcgacggggcgtccaatccgcttcttcatgaccgccggaaaggtcagcgactacatcggagctatggctttgctaggcagcctgcccaaggccggctggcttctagcggatcggggctatgacgcggactggttcagagatgca

SEQ ID NO: 234 - protein, 58 aa, Corynebacterium glutamicum
MNTKLHAVTDATGRPIRFFMTAGKVSDYIGAMALLGSLPKAGWLLADRGYDADWFRDA

SEQ ID NO: 235 - DNA, 1731 bp, Corynebacterium glutamicum
  CDS (101)..(1708): RXA00005
gtggaagcccagttcacctctcccctgctcaacaatgggcaaacctgtttccttggtacccgaatccttgctccaaaatcacggcgggttcagggggtgaatgcaccacgagcaacccgaagggtgcgaagtgggcattcgtagaacaatcccagaggaaagccgtacggctttcctcgacatgatcaatcaaggtatgtcaggtcttgctgcgtctacagcggtcggggtcagtgaattcaccgggcgaaagtgggcgaaggccgccggggtgaaactgacccgcggcccgcgaggtggcaatgcttttgacaccgccgagaaacttgagattgcagccagcatgctagagaaaggatgcctaccccgagaaatcggcgagtatgtcggcatgactcgggccaatatatccctatggcgcaaacaaggcccagacaagcttcgccaacgcgcagccaccttgcgcaccggcaagcgagcagctgaattcatccacgccccggtgatgggcccttattatgggccacgcacactccatcaagtgttgcgtgaggactacacaacactgtttgacgagttatctgcgttggggttgccagcacaggtgtgtggggccttacttcatcttgctccaccaccatcattacgcttttcttatatgtcgtgtgtagtgccgttatttgctgatgaaatcaaagtcgtaggacaaggcacacgattatcgttagaagagaaaatgatgatccaacgtttccatgacaccggggtcagtgcagcagaaatcggtcgacgcctgggtcggtgtcggcaaacaatttccagggaacttcgacgtggtcaagatgatgatggacgttatcgtgcacgcgactcctatgaaggtgcgatcaggaaactagcgcgtccgaaaacaccgaaacttgatgccaatcgtaggcttcgggctgtggtggtcgaggcgttgaataataaattatctccggagcagatttctggtcttttagccaccgagcatgctaacgatagctctatgcagattagtcatgaaactatttaccaggcgttatatgttcaaggtaaaggggcgttgcgtgatgaattgaaggtggagaaatttcttcgtaccggtcggaagggacgtaaaccgcagtcgaagttgccatcgagaggtaagccgtgggtggagggtgcgttgattagtcaacgcccagcagaagttgctgatcgtgctgtgcctgggcactgggagggcgatttagtaattggtggtgaaaaccaagcgacagcgttggtgacgttggtggagcgcacgagccggttgacgttgattaagcggttgggggttaatcatgaggcgtcgactgtgacggatgcgttggtggagatgatgggtgatttgccgcaggcgttgcgtcggagtttgacgtgggatcagggtgtggagatggcagagcatgcgcggtttagcgtggtgaccaagtgtccggtgtttttctgtgatcctcattcgccgtggcagcgtgggtcgaatgagaatacgaatggattggtcagggattttttcccgaagggcactaattttgctaaagtaagtgacgaagaagttcagcgggcacaggatctgctgaattaccggccgcggaaaatgcatggttttaaaagcgcgacgcaggtatatgaaaaaatcgtagttggtgcatccaccgattgaattcgccctaggttggatgc

SEQ ID NO: 236 - protein, 536 aa, Corynebacterium glutamicum
MHHEQPEGCEVGIRRTIPEESRTAFLDMINQGMSGLAASTAVGVSEFTGRKWAKAAGVKLTRGPRGGNAFDTAEKLEIAASMLEKGCLPREIGEYVGMTRANISLWRKQGPDKLRQRAATLRTGKRAAEFIHAPVMGPYYGPRTLHQVLREDYTTLFDELSALGLPAQVCGALLHLAPPPSLRFSYMSCVVPLFADEIKVVGQGTRLSLEEKMMIQRFHDTGVSAAEIGRRLGRCRQTISRELRRGQDDDGRYRARDSYEGAIRKLARPKTPKLDANRRLRAVVVEALNNKLSPEQISGLLATEHANDSSMQISHETIYQALYVQGKGALRDELKVEKFLRTGRKGRKPQSKLPSRGKPWVEGALISQRPAEVADRAVPGHWEGDLVIGGENQATALVTLVERTSRLTLIKRLGVNHEASTVTDALVEMMGDLPQALRRSLTWDQGVEMAEHARFSVVTKCPVFFCDPHSPWQRGSNENTNGLVRDFFPKGTNFAKVSDEEVQRAQDLLNYRPRKMHGFKSATQVYEKIVVGASTD

SEQ ID NO: 237 - DNA, 417 bp, Corynebacterium glutamicum
  CDS (101)..(394): RXA00017
tcatccaatgtggagaagttcaaaagctgaagctggacctgacccccggatggtggacaccttgaaacaagcatgatgctgggaaaggtaatctgccaccatgccacgcaagacctacacagaggagttcaagcgcgacgctgtcgcgctctacgagaactccgccggcacctcgatccagaagatcgccaatgatctcggaatcaaccgaatgacccttaaaaactggattactaaatacggggccaactcaactccacatggcgctaacacggccaccgcgctgtccgaagctgaacggatccgccaacttgaaaaggaaaatgcactcctccgcgaagagcgtgacatcctgcggaaagcggccaaatatttcgcggaagagacgaactggtgatccgcttccgattcgttgat

SEQ ID NO: 238 - protein, 98 aa, Corynebacterium glutamicum
MPRKTYTEEFKRDAVALYENSAGTSIQKIANDLGINRMTLKNWITKYGANSTPHGANTATALSEAERIRQLEKENALLREERDILRKAAKYFAEETNW

SEQ ID NO: 239 - DNA, 222 bp, Corynebacterium glutamicum
  CDS (101)..(199): RXA00057
tcgcgtcgacgctttcgaacaggtgctgttttagaagggaaatagacaacaaatataaccctacaaatattatatagacagcctcggaatgaggcagtcattgggatcaattggcaccagtgctgacaacgcgttagcggagtcgttcaacgccgcactcaggcgggaagtcctccaagattctaagacttttgcgaactagttgatctgccgccgggatgt

SEQ ID NO: 240 - protein, 33 aa, Corynebacterium glutamicum
LGSIGTSADNALAESFNAALRREVLQDSKTFAN

SEQ ID NO: 241 - DNA, 921 bp, Corynebacterium glutamicum
  CDS (101)..(898): RXA00227
tgggtttgcttcggatggggctttaacaagcttcacagatgttggtttttcataggcaagctatccagaagtaggctttacagaaagtcagggtgtggcaatggtgatgcagggcattggtggtaggaagctggcggcgacggtgctgttggttcgggatgggatcatcaatgggcgtcctgatgtggaggtttacattcaggagcgtgtgtctactatggctaattttcctcgggcgacggtgtttccgggtgggggtgttgattctcgggattttgcggatggtcacggtaaggaagtgtggaggggacctagcgcggaggagtggggtgtgcgtttaggcgtggagcctcatgttgcgtatgcgttggtttttgctgcggttcgtgagttgtttgaagaggccggtacgttgcttgcggagcatacggatggttctggtttggtgaagaatgctggtcagtatcacggatatcgggagttgttggagactcatgagatgtcgctgacggatatgttgcagagtgagaatttggcgattcgtagtgatttgattgtgccttttgccaggtgggcgagccctgagggtaatagggagcagtttgatacgttttcttttgttgctgtggagccggaggggcagtgtgcggatggtaatacgtcggaggcgtcttcgacggggtattttcctgcacggctgattttggatggttggcgcgccgggttgttgaggttggttattccgacgtgggcgtcgttgtttgagttgtcgcagtttaagactgtggaggaattgctggagtacagcgcgcaggttgatatgtctcctgtgttggatgatgcggtggataatccgaggtatgcggagttttatcaggcgatgcgcacggaacggttttgatcatttaaggttcattcatg

SEQ ID NO: 242 - protein, 266 aa, Corynebacterium glutamicum
MVMQGIGGRKLAATVLLVRDGIINGRPDVEVYIQERVSTMANFPRATVFPGGGVDSRDFADGHGKEVWRGPSAEEWGVRLGVEPHVAYALVFAAVRELFEEAGTLLAEHTDGSGLVKNAGQYHGYRELLETHEMSLTDMLQSENLAIRSDLIVPFARWASPEGNREQFDTFSFVAVEPEGQCADGNTSEASSTGYFPARLILDGWRAGLLRLVIPTWASLFELSQFKTVEELLEYSAQVDMSPVLDDAVDNPRYAEFYQAMRTERF

SEQ ID NO: 243 - DNA, 570 bp, Corynebacterium glutamicum
  CDS (101)..(547): RXA01819
ggttggggtcatcaaaggatgcggacatcgctgtggggttgtgtaataattgcacctgtgaggtgcctttctggcaggtgaatcaggactctaagcaagcttgattcttccagttcaggagggcatttcctattttcccacgccgttacacctgaatcacatcggtggatccaggtttaagaagttcctggtcaagatcgacaagactgttccccaggaccttgatgttcatgttatttgtgacaactacgccacgcataaacacccgaccatcaatacctggttggtcaagcatccacggtttcacatgcacttcaccccgacgtattcgtcctggatcaaccaggttgaacggttgttcgctgaggtgacccgggagttactccagcgttctgatcatcggagtgtccaggccctggagaaagatttacgcaactgggtgaaagcatggaacgaggatcctaagccgtttatctggaccaaaaccgcggaggagatcctttcctctatcgcccgatacttaaaacgaattaacggcgcaggacactagcagcagcgtaagaagaaaag

SEQ ID NO: 244 - protein, 149 aa, Corynebacterium glutamicum
LILPVQEGISYFPTPLHLNHIGGSRFKKFLVKIDKTVPQDLDVHVICDNYATHKHPTINTWLVKHPRFHMHFTPTYSSWINQVERLFAEVTRELLQRSDHRSVQALEKDLRNWVKAWNEDPKPFIWTKTAEEILSSIARYLKRINGAGH

SEQ ID NO: 245 - DNA, 879 bp, Corynebacterium glutamicum
  CDS (101)..(856): RXN03052
ccgctttatctactacggcctcagccatagcgtggttggcgaagttgtgtttgcaatagttttttaaatatccccagccttcattcctgtaacggtcataatgcccttttctcacgacaaatctgaactcggtggggaaaccccctacgggcttgtacatgttaaccctatggctgaagtgcgacctgtaaaagcacaaaccaacgagccccaagcactgcaggttgctgacattcaaccctttcacgctgttattgcggcctcaaaacaattgactctcatcgacgttgtcgatgtctgccttggaacagtgttgcgagcatgggaagcactgagcctgcgatgggtagacgtggtgcttgacgaggagcatccaagaatctttatccgaggcaccattgtctacaacaaagaaaaaggtaaccacagacaagataaaacaaaaacgaccagcagtaggcgtgtcattcagttgccagaaattgcctcagacgtcttacgcaaaagacatgcactctacgccgaacatctcgaaatggtgttcccttccgctagaggcacatatatttatgagtccaatttcaacaaattgttgcgaaaacaccgaaagggtactgcatatgattgggtgaccgtgcacagcatcaggaaaacccttgcatcaattgtctctgagaaccttgattccaaggccgcatcagacgtactcggccatgctgactcacgactcacagaacgggtctacatcgctaaaactgacaaagacgttccgattggtgatgtcgtcaaccaagcgctcaaagaggcacgaaaagtctccaaaaagtctccaaataaagaagctaaagaagaagaatagacgcaatagttgcattttta

SEQ ID NO: 246 - protein, 252 aa, Corynebacterium glutamicum
MPFSHDKSELGGETPYGLVHVNPMAEVRPVKAQTNEPQALQVADIQPFHAVIAASKQLTLIDVVDVCLGTVLRAWEALSLRWVDVVLDEEHPRIFIRGTIVYNKEKGNHRQDKTKTTSSRRVIQLPEIASDVLRKRHALYAEHLEMVFPSARGTYIYESNFNKLLRKHRKGTAYDWVTVHSIRKTLASIVSENLDSKAASDVLGHADSRLTERVYIAKTDKDVPIGDVVNQALKEARKVSKKSPNKEAKEEE

SEQ ID NO: 247 - DNA, 478 bp, Corynebacterium glutamicum
  CDS (101)..(478): RXN02915
cacttaatgccatgaccttgtgcatgcatagtgtcatgaccttgtgcacaccccagacctacaccacaggcatagtcctaggctgctcacaattgacatcatgcctaaacccctacccccagaaacccgacgcaagatcatcgatttcgatccgttcgcaccgaacagcccctcgatcgaagagttctgcagtcggctaaaaatatcgcggcgcagcttctacaacatccgcaaccgataccaacaagacgccaacgcagcactgcattcacactccagcgccccaatcaccgcccggcgaacgtacgatgaatccatcaccagcaccttgctgtccatccgcgcacgcctgaaagcccaaggatgggagtacggcccgatctctattcgattcgaaggcatcttcacccgggaactgactgcaccgattccatctgtttcaaccattgctcgtttgttacgcgccgcaggagctgtt

SEQ ID NO: 248 - protein, 126 aa, Corynebacterium glutamicum
MPKPLPPETRRKIIDFDPFAPNSPSIEEFCSRLKISRRSFYNIRNRYQQDANAALHSHSSAPITARRTYDESITSTLLSIRARLKAQGWEYGPISIRFEGIFTRELTAPIPSVSTIARLLRAAGAV

SEQ ID NO: 249 - DNA, 657 bp, Corynebacterium glutamicum
  CDS (101)..(634): RXN02919
atttccctcgcgagatccatcctgtgggcggtgcacaggtcactgccgctacgggctcagctgacctaagatctcgaggaaatgatgacttcagcgcggagtgccggtcgatcacaccaccatctaccgctgggtccagaaatacgcccctgagctggataagcagactcgctggtaccggcaggttcctgactggcaggccagttcctggcgggtggatgagacctatatccgggtcggcggcacgtggtgctatctctaccgggctattaccgcgggtgggcagaccctggagttttatctctcaccaaaacggaatgtggctgcggccaagcgtttcctggccaagacgctgcgatcgaatacgacagccgggtccccgcgggtcatcaacaccgacaaggcaccagctctggccaaggcaatatccgagctgaaggcggagggaatctgccctcagacggtggagcaccggcaggtgaaatacctcaacaacgttatcgagggagatcatggccgactcaaaagaatcctggggccgaagggagcgttcaaaaaccgaatttccgcctaccggacgttgaaagggatggaggcgatgcattcattgcggaaagggtcagggaacgatgtttgacctcacgggcacccgaaccc

SEQ ID NO: 250 - protein, 178 aa, Corynebacterium glutamicum
VPVDHTTIYRWVQKYAPELDKQTRWYRQVPDWQASSWRVDETYIRVGGTWCYLYRAITAGGQTLEFYLSPKRNVAAAKRFLAKTLRSNTTAGSPRVINTDKAPALAKAISELKAEGICPQTVEHRQVKYLNNVIEGDHGRLKRILGPKGAFKNRISAYRTLKGMEAMHSLRKGSGNDV

SEQ ID NO: 251 - DNA, 1281 bp, Corynebacterium glutamicum
  CDS (101)..(1258): RXN03033
aagaccatcagaatcaaatggtgatcgatatcttgggaaaagctattgggaccaggcccaatcctggcgagggcttagacgaggaggacgccacctaaacgtggatgagcaacgcgcctttgatcaaggactcaaggaagaaaacaccttgatcacagatctcaccacctgtgccaggctgagccataacaaggcattacggctgatcaagctgtcgaaatcaacggcgtattaccgcaacaagccgcgtccccgtcctgcaccgaaacctgtcctgcaggccgtgccagcaccaacagcacctggtgtggaacccacaccagagccttggcaggggaaggagccagcagtgtcgtcggtgcgtcaagcgttggcagaacacgaacgccagttcattgttgatgcgatcaccgcgtacccacaactgagcgttagtggggtgtttaacatgttgtttaacaaaggcatctaccgcgcatcactacgtacatggtggcgtgttgccaagcagcacaagttgttacacaaagaccgagtcagtgccctgtccccggggaaacgatcaccaacgccacgggttaagccgaggttggaagcaacacagcctggtcaggtggtgtgttgggatgtgacgttcttgccgtcgctggtacgtggtaagacctatgcgttgcatctggcgattgatttgttttcccgcaagattgttggggcgaaggtcgcgccgacggaaaatacctccaccgcggtggagttgttaacgcaggtgttagcggataatccgggtgtggtgacggtgcattcggataatgggtcggcgatgacatcgacgagggtgcggcggttgttagcggatcatggtgtggcgttgtcgttgattcggccgcgggtgagtgatgataatgcgtttgtggagtcggtgtttcatacgttgaagtatcggccgttttatccgaaggtgtttgcatcgatggatcaggcccgggtgtgggtggaggagtttgtggtgtattacaacacggttcatccgcattctggtgtggctgggcatactccgcagtcggtgtttgatggtagttggagggcggctcataggttgcgtgtgcaggcgttggatgcccattaccggcagttcccgcagcggtatgtggggcggccggtggttcaggaagttgctggtgtggtgcgtcttaatggtgcgcgtgatgatgggtctgtacaggagagggttggtggtgtagcgtcgctgttaagtgcttgagttagcatgtgttcttatcg

SEQ ID NO: 252 - protein, 386 aa, Corynebacterium glutamicum
VDEQRAFDQGLKEENTLITDLTTCARLSHNKALRLIKLSKSTAYYRNKPRPRPAPKPVLQAVPAPTAPGVEPTPEPWQGKEPAVSSVRQALAEHERQFIVDAITAYPQLSVSGVFNMLFNKGIYRASLRTWWRVAKQHKLLHKDRVSALSPGKRSPTPRVKPRLEATQPGQVVCWDVTFLPSLVRGKTYALHLAIDLFSRKIVGAKVAPTENTSTAVELLTQVLADNPGVVTVHSDNGSAMTSTRVRRLLADHGVALSLIRPRVSDDNAFVESVFHTLKYRPFYPKVFASMDQARVWVEEFVVYYNTVHPHSGVAGHTPQSVFDGSWRAAHRLRVQALDAHYRQFPQRYVGRPVVQEVAGVVRLNGARDDGSVQERVGGVASLLSA

SEQ ID NO: 253 - DNA, 1281 bp, Corynebacterium glutamicum; identical to SEQ ID NO: 251
  CDS (101)..(1258): RXN03035

SEQ ID NO: 254 - protein, 386 aa, Corynebacterium glutamicum; identical to SEQ ID NO: 252

SEQ ID NO: 255 - DNA, 1065 bp, Corynebacterium glutamicum
  CDS (101)..(1042): RXN03049
  All occurrences of Xaa = any amino acid
accagggtgcacgttccctgcacttcatcgccatggtgttgatgacgggctttgtcatcatgcacgtcggcctggttttttggtccatggcgactacaacatggtccacatggtcttcggcgatatgaacactgaccgtgcggcgcaggcctacatcatcgtgatcaccaccatcgtcatggtggtgttgttctggatcgtgctcagatattggtcgctggctgaccgggcccgcgcccagcggttcaccgccagcatcacggagatcggacgcaaaatcttcctcaaccggctgcgtccccggatgagcaggcagaacacctacacggacaaggacatctcgcagttccactggaccaatggcctgccgccgaccgatgatgaatcccccgagtggatcgccgcccgcgacaacgagtgggagggatacaccatcaccctcggcgacgatcccaacggcaccgagaaaaccatcaccctcgacgatctgcgggagctgccgcagacctcgtatgtcgccgtccacacgtgcatgcagggctggtcagctaccgcccggtggacaggggtgcggttacgtgatgttttgtgtcatgaccttgtgcacaccctagaccttcaccacaggcatagtcctcggctgctcacaattgagatcatacctaaacccctgcccccagaaacccgatgcaagatcatcgatttcgatctgttcgcaccgaacagtccctcgatcgaagagttctgcagtcggcttaaaatatcgcggcgcagcttctacaacatccgcaaccgataccaacaagatgccagtgcagcgctgcatccacgctccagcgcccagatcacctcccggcgaacatacgatgaatccatcaccagtatcttgttggccatccgcgcaccgcctgaaagcccaaggatgggartacggyccgatctctatycgattcgaaggcatckccaccggggaactgactgcaccgattccatccgtctcaactatcgcttgcttgttacgcgctgcaggagcagtcgaaagtaaccctaagaagcgaccaaagt

SEQ ID NO: 256 - protein, 314 aa, Corynebacterium glutamicum
  All occurrences of Xaa = any amino acid
MVHMVFGDMNTDRAAQAYIIVITTIVMVVLFWIVLRYWSLADRARAQRFTASITEIGRKIFLNRLRPRMSRQNTYTDKDISQFHWTNGLPPTDDESPEWIAARDNEWEGYTITLGDDPNGTEKTITLDDLRELPQTSYVAVHTCMQGWSATARWTGVRLRDVLCHDLVHTLDLHHRHSPRLLTIEIIPKPLPPETRCKIIDFDLFAPNSPSIEEFCSRLKISRRSFYNIRNRYQQDASAALHPRSSAQITSRRTYDESITSILLAIRAPPESPRMGXRXDLYXIRRHXHRGTDCTDSIRLNYRLLVTRCRSSRK

SEQ ID NO: 257 - DNA, 951 bp, Corynebacterium glutamicum
  CDS (101)..(928): RXN03070
gtggataaaagggaaaacataggggtcatgaaatagaacaagcacgaggcctggtaaatacgaattcgaccaagaaaacgtaaacaccccaggagtactcgtgcctgcccttccatcatctatcatcgaccccctctggcgccagttctccgccttaatcccaccggttatcatcacccacccactagggtgccaccgtgcacgcattgctgaccggatcatcgtcgacaaactcatcgcagtgcttgtcctcggtgtctcctatatcaagatttccgattccacctgctcagccaccacgatacgcacccgccgagacgagtggatcactgccgggattttcaagaatttagaacagatctgtctggagtcctacgaccgtttcatcgggttagacctagaaaacttaaatgttgatggctgcattgttaaagctccctgcggcggagaggtagccggcagattcccggttgaccgggaaaaaggcaccaaacgctcgttaatggtcgatggacatggaatcccgatcgggtgcgtggtcgccggagccaatcggcatgatttaccgttgttagctgcaaccttggacacgctcggccggtttgggggctctcttcccgatcagatcacggtgcatctcgatgctgggtatgactcgaagaaaacccgcaggctactcagcgaatttggttatagctgggtgatcagcattaaaggtgagccgctgcaggctgggactcggtgggtggtggagcgtactaactcttggcataaccggggttttaagaaacttagtatctgcaccgaacgttgtacccgggttgtggaagcgtttatcgctttagccaacgcggtgattattctgcgtcggcttatcaaacaggcctggactagttaccgctgggacacccgaccgggccacagaccttaatctatccgcgcaatctctaa

SEQ ID NO: 258 - protein, 276 aa, Corynebacterium glutamicum
VPALPSSIIDPLWRQFSALIPPVIITHPLGCHRARIADRIIVDKLIAVLVLGVSYIKISDSTCSATTIRTRRDEWITAGIFKNLEQICLESYDRFIGLDLENLNVDGCIVKAPCGGEVAGRFPVDREKGTKRSLMVDGHGIPIGCVVAGANRHDLPLLAATLDTLGRFGGSLPDQITVHLDAGYDSKKTRRLLSEFGYSWVISIKGEPLQAGTRWVVERTNSWHNRGFKKLSICTERCTRVVEAFIALANAVIILRRLIKQAWTSYRWDTRPGHRP

SEQ ID NO: 259 - DNA, 742 bp, Corynebacterium glutamicum
  CDS (101)..(742): RXN03121
ctaggggtggcgggattgcaaaaatccgtccccggttcgccatgaaatgctgattttgatcgaatctttgcgctaactgtagggcgggttcagggggtgaatgcaccacgagcaacccgaagggtgcgaagtgggcattcgtagaacaatcccagaggaaagccgtacggctttcctcgacatgatcaatcaaggtatgtcaggtcttgctgcgtctacagcggtcggggtcagtgaattcaccgggcgaaagtgggcgaaggccgccggggtgaaactgacccgcggcccgcgaggtggcaatgcttttgacaccgccgagaaacttgagattgcagccagcatgctagagaaaggatgcctaccccgagaaatcggcgagtatgtcggcatgactcgggccaatatatccctatggcgcaaacaaggcccagacaagcttcgccaacgcgcagccaccttgcgcaccggcaagcgagcagctgaattcatccacgccccggtgatgggcccttattatgggccacgcacactccatcaagtgttgcgtgaggactacacaacactgtttgacgagttatctgcgttggggttgccagcacaggtgtgtggggccttacttcatcttgctccaccaccatcattacgcttttcttatatgtcgtgtgtagtgccgttatttgctgatgaaatcaaaatcgtaggacaaggcacacgattatcgttagaagagaaaatgatg

SEQ ID NO: 260 - protein, 214 aa, Corynebacterium glutamicum
MHHEQPEGCEVGIRRTIPEESRTAFLDMINQGMSGLAASTAVGVSEFTGRKWAKAAGVKLTRGPRGGNAFDTAEKLEIAASMLEKGCLPREIGEYVGMTRANISLWRKQGPDKLRQRAATLRTGKRAAEFIHAPVMGPYYGPRTLHQVLREDYTTLFDELSALGLPAQVCGALLHLAPPPSLRFSYMSCVVPLFADEIKIVGQGTRLSLEEKMM

SEQ ID NO: 261 - DNA, 484 bp, Corynebacterium glutamicum
  CDS (101)..(484): RXN03161
acccaccaggacgggttgtgtgcgggattttcttatcctacaaaacggtgctgttgcaaagttggggcagtaggaagaccggcgtggaataatcaggtccatgggcatcttctccggtcggcagttccctcgtgaaatcatcctgtgggcggtgcggtggtactgccgctacggcgtgagctatcgcgacctcgaagagatgatgaccgagcggggagtgccggtcgatcacaccacgatctaccgctgggtccagaaatatgctcctgagctggataagaagacccggtggtatcggcaagttcctgactggcaggccaggtcctggcgggtggatgagacctatatccgggtcgggggaaagtggtgctacctctatcgggcaatcaccgccggtagccagaccctggacttctacctctccccgaagagaaacgtcgcggcggcgaagcgtttcctggcgaagacgctgcggtcgaataat

SEQ ID NO: 262 - protein, 128 aa, Corynebacterium glutamicum
MGIFSGRQFPREIILWAVRWYCRYGVSYRDLEEMMTERGVPVDHTTIYRWVQKYAPELDKKTRWYRQVPDWQARSWRVDETYIRVGGKWCYLYRAITAGSQTLDFYLSPKRNVAAAKRFLAKTLRSNN

SEQ ID NO: 263 - DNA, 393 bp, Corynebacterium glutamicum
  CDS (50)..(370): RXN03165
ggggttaatcataaggcgtccactgtgacggaatgcgttggtgaagatcatgggtaatttgccgcaggcgttgcgtcatagttttacgtgggatcagggtgtgcagatggcagagcatgcccggttaagcgtggtgaccaagtgcccggtgtttttctgtgatcctcattcgccgtggcagcgtgggtcgaatgagaatacgaatggattggtcagggattttttcccgaagggcactaattttgctaaagtaagtgacgaagaagttcagcgggcacaggatatgctgaattaccgaccgcggaaaatgcatggttttaaaagcgcgacgcaggtatatgaaataatcgtagttggtgcatccacggattgaattcgcctaggagattgtgc

SEQ ID NO: 264 - protein, 107 aa, Corynebacterium glutamicum
MGNLPQALRHSFTWDQGVQMAEHARLSVVTKCPVFFCDPHSPWQRGSNENTNGLVRDFFPKGTNFAKVSDEEVQRAQDMLNYRPRKMHGFKSATQVYEIIVVGASTD

SEQ ID NO: 265 - DNA, 423 bp, Corynebacterium glutamicum
  CDS (101)..(400): RXN00083
gaagatacagggggccacggtggggtggtgaacaagagcaggcacgaggcctggtagatacggattcgaccaagaaaacgtacaccactcaggagcactcgtgcttgcccttccatcctctatcatcgaccccctctggtgccagttcgccgcgctgatcccacccgtgaccgacacccacccacttcggtgccaccgcccacgcatcccggaccggatcatcttcgacaagctcatccaggtcctcgtcctcggcgcctcctatgccaagatcgccgacacgacatgctcggccaccaccttgcgcacccgccgggacgagtggatcaccgctggcatcttcgagcagctggaacagatctgtttggaattctacgaccgtatcgtcggactcgatctctaagttcggattggctcgaattg

SEQ ID NO: 266 - protein, 100 aa, Corynebacterium glutamicum
VLALPSSIIDPLWCQFAALIPPVTDTHPLRCHRPRIPDRIIFDKLIQVLVLGASYAKIADTTCSATTLRTRRDEWITAGIFEQLEQICLEFYDRIVGLDL

SEQ ID NO: 267 - DNA, 230 bp, Corynebacterium glutamicum
  CDS (1)..(207): RXN02004
cgcgtcggccgtctgatgcgtcagaacggcattctcatcatccgcagccggaagttcaagcgcacgaccggcagcgatcataccttcaacatcgcaccgaactttctgcagcaggactttatggcgagcaggccgaaccagaagtgggcgggcgacatcacctatgtctggacgcgcgagggcctgggtctatctggccgacattcttgacctttatccccgccgggtga

SEQ ID NO: 268 - protein, 69 aa, Corynebacterium glutamicum
RVGRLMRQNGILIIRSRKFKRTTGSDHTFNIAPNFLQQDFMASRPNQKWAGDITYVWTREGLGLSGRHS

SEQ ID NO: 269 - DNA, 675 bp, Corynebacterium glutamicum
  CDS (101)..(652): RXN02287
ttgaaaaaggaacattagtgccagtaacaagagcccagttgaattcaagcgggcagagacacatctggccctcaaaattttccttttactggagaccactgtgtactcaatttcagaaactatcgcccgaactcttatgccccgcaccgatcacgttttcgacctgatgggcaacggaaacgcctggttcgtcgatgccctagaacgcctcgggcgaggcatcatcaccgtccgccccacagttgaaaccgtggccgccgcggacacctaccaccgcgtcacccgccgcccggcggtcgctaccaccacctatggtgctggtttcaccaacaccatgaccacgcttgccgacgtcgccctctcccgtatcccacttcttttagttgtgggcactgccccgagcgccgggcctcgctgtttcgacattgaccggcaaggactcgcacgtgccgtaggtgtggaaaccttcaccgtgcatgcagatgacgttgctgcggtaactcttcaggcttggaataatacgccggaaaacacacacgtgatcctggaaatcccctatgacctagcagctgccacagccaccgatccaacagtgactacatacctgctgcgccccggatttcagaaactcccgatgtcaccgaccttgtcctagctctacgcaatgcccaaaat

SEQ ID NO: 270 - protein, 184 aa, Corynebacterium glutamicum
VYSISETIARTLMPRTDHVFDLMGNGNAWFVDALERLGRGIITVRPTVETVAAADTYHRVTRRPAVATTTYGAGFTNTMTTLADVALSRIPLLLVVGTAPSAGPRCFDIDRQGLARAVGVETFTVHADDVAAVTLQAWNNTPENTHVILEIPYDLAAATATDPTVTTYLLRPGFQKLPMSPTLS

SEQ ID NO: 271 - DNA, 1431 bp, Corynebacterium glutamicum
  CDS (101)..(1408): RXN02963
aacctgggctagcggtgtagacccgaaaataaacgagccttttgtcagggttaaggtttaggtatctaagctaaccaaacaccaacaaaaggctctacccatgaagtctaccggcaacatcatcgctgacaccatctgccgcactgcggaactaggactcaccatcaccggcgcttccgatgcaggtgattacaccctgatcgaagcagacgcactcgactacacctccacctgcccagaatgctcccaacctggggtgtttcgtcatcacacccaccggatgctcattgatttacccatcgtcgggtttcccaccaaactgtttatccgtctacctcgctaccgctgcaccaaccccacatgtaagcaaaagtatttccaagcagaactaagctgcgctgaccacggtaaaaaggtcacccaccgggtcacccgctggattttacaacgccttgctattgaccggatgagtgttcacgcaaccgcgaaagcacttgggctagggtgggatttaacctgccaactagccctcgatatgtgccgtgagctggtctataacgatcctcaccatcttgatggagtgtatgtcattggggtggatgagcataagtggtcacataatagggctaagcatggtgatgggtttgtcaccgtgattgtcgatatgaccgggcatcggtatgactcacggtgtcctgcccggttattagatgtcgtcccaggtcgtagtgctgatgctttacggtcctggcttggctcccgcggtgaacagttccgcaatcagatacggatcgtgtccatggatggattccaaggctacgccacagcaagtaaagaactcattccttctgctcgtcgcgtgatggatccattccatgttgtgcggcttgctggtgacaagctcaccgcctgccggcaacgcctccagcgggagaaataccagcgtcgtggtttaagccaggatccgttgtataaaaaccggaagaccttgttgaccacgcacaagtggttgagtcctcgtcagcaagaaagcttggagcagttgtgggcgtatgacaaagactacggggcgttaaagcttgcgtggcttgcgtatcaggcgattattgattgttatcagatgggtaataagcgtgaagcgaagaagaaaatgcggaccattattgatcagcttcgggtgttgaaggggccgaataaggaactcgcgcagttgggtcgtagtttgtttaaacgacttggtgatgtgttggcgtatttcgatgttggtgtctccaacggtccggtcgaagcgatcaacggacggttggagcatttgcgtgggattgctctaggtttccgtaatttgaaccactacattctgcggtgccttatccattcagggcagttggtccataagatcaatgcactctaaaacaggaagagccagtaaac

SEQ ID NO: 272 - protein, 436 aa, Corynebacterium glutamicum; identical to SEQ ID NO: 180

SEQ ID NO: 273 - DNA, 2787 bp, Corynebacterium glutamicum
  CDS (101)..(2764): RXA02788
cacctagtggagacgggtaaagttaccaccagtccatttttaggcgtgtgtttttgaatgcgctaaaacatttcgagaagttctaaggcaggataccgctgtgcagacccatgagatcagggagcgttttaccaatcacttcgtcaatgccggtcaccaggcggtacctagcgcgtcactgattctcgacgaccctaacctgctgttcgttaacgcaggcatggttccattcaagccgtacttcctgggccagcagaccccaccttttgaaaacggcactgcgacttccattcagaagtgtgttcgtaccctggatatcgaagaagtgggtatcaccactcgccacaataccttcttccagatggcaggtaacttctccttcggccagtacttcaaagaaggcgcaattacccacgcatggggccttctgactggttccgtagcagacggaggctttggccttgatccagagcgcctctgggtcactgtgtacctcgatgatgacgaggctgcagagatctgggaaaagaagatcggcgtcccatcagagcgcatccagcgcctgggtatggctgacaactactggtccatgggtgtaccaggaccttgtggcccttgctccgagatctactacgaccgcggcgagaagtacggcaaggaaggcggccctgtcgctgacgacaaccgctacatggagatctggaacctggtcttcatggagaaggaacgcggacagggtattggcaaggacaacttcgacatccttggcgatcttccaaagaagaacatcgataccggcatgggcgtcgagcgcgttgcctgcatcctccaggatgttgaaaacgtctacgaaaccgacctgctgcgcccagtcatcgacgttgcagagaccctgaccggaaccaagtatggttctgacaacacctctgacattcgcttccgcgttatcgccgaccactctcgtaccggcatgatgctcatcctcgatggtgttaccccaggcaacgaaggccgtggatacatcctgcgccgcctgcttcgccgcattatccgttccgcacgtctgctcggtgctactggtgagaccatggagcagttcatgaacaccatcatggacaccatgaccccgtcctacccagaaatcgccgacaaccgtgagcgcatcatgcgtgtggctgtcaccgaagagcgcgctttcttgaagactctggtctctggaacccacctcttcgaagaggctgcaacctccatcaaggctgcaggatccaccaaggttgccggtgctcaggcattcgcactgcacgacacctacggtttccccatcgacctcaccctcgaaatggctgcagaagcaggccttgaggttgacgttgaaggctttgattccctcatggcagagcagcgctcccgtgcaaaggctgacagccaggcaaagaagcacggccacaccgacttgagcatctaccgcgaatgggtcgacaacaacccaaccgtattcaccggctttgaggaactggattcccagtccaaggtcctcggactactttccgatggtgccaagatttctgaagccacagaaggtcaagaagttgaggtcatcctcgaccagtcacctctgtacgcagaatcaggtggacagctcggcgatcgtggtcagatcctgctcggagacaccgtgcttgatgtccatgacgtgcagaagatcggtaagaaactgtgggttcacaaggcactcgtggcaaacggtggacttgcggtaggtgatgaagtggtggcaagcgtcgataagcaatggcgccatgctgcacgccaggcacacaccgcaacccacctgattcatgccgctctgcggcaggttcttggaccaactgccctccaggcaggatccatgaacaagccaggctacctgcgcttcgacttcaactacaccgagcagctcaccccagcacaagtcgagcaaatccaggcgatcaccaacgaagccgtggacaccgactgggctgtcaacaccgtggaaacctcactcgaggaagccaaggcaatgggtgcgatggcgctcttcggcgaaaactacggaagcaccgtgcgcgttgtggaaatcggcggacctttctccatggaactctgtggcggtacgcacgttgcgcactcctcacagatcggcccagtggcactgttgggtgaatcatccatcggctccggcgtgcgccgcatcgaggcctactccggcctgaactccttcaactacctgtccaaggaacgcgcactcgccgagggtttggcaagctccctgaaggctccatccgaggaacttccagagcgcgtcgcacagctggtagacaagctgaaggcagcagagaaggaaatcgaagccctgcaccgtcagcagctcatggcacaaaccgcagacctgttgaacaacgctcaagagatcggtggcgtcaccaccttgctgctgcgcgtcaaggacaacaccaacgccggtgacctgcgcaccatcgcaaccaccctgaaggacaagctcggcgaccgcgaaggcgtcttggttattgcctccgacaacgccggcaaggttccattcgtggtagctgcaaccaaggccgctgtggctcgcggagctcactccggcaacctggttaagctcgttggttcctacatcgacggtcgcggtggcggcaaggctgacctcgcacaaggatccggcgccaacattgctggcctggaatccgcattcggcgcagtccgcgctgagatcgaggcactctaagccttcagtctaggccctaa

SEQ ID NO: 274 - protein, 888 aa, Corynebacterium glutamicum
VQTHEIRERFTNHFVNAGHQAVPSASLILDDPNLLFVNAGMVPFKPYFLGQQTPPFENGTATSIQKCVRTLDIEEVGITTRHNTFFQMAGNFSFGQYFKEGAITHAWGLLTGSVADGGFGLDPERLWVTVYLDDDEAAEIWEKKIGVPSERIQRLGMADNYWSMGVPGPCGPCSEIYYDRGEKYGKEGGPVADDNRYMEIWNLVFMEKERGQGIGKDNFDILGDLPKKNIDTGMGVERVACILQDVENVYETDLLRPVIDVAETLTGTKYGSDNTSDIRFRVIADHSRTGMMLILDGVTPGNEGRGYILRRLLRRIIRSARLLGATGETMEQFMNTIMDTMTPSYPEIADNRERIMRVAVTEERAFLKTLVSGTHLFEEAATSIKAAGSTKVAGAQAFALHDTYGFPIDLTLEMAAEAGLEVDVEGFDSLMAEQRSRAKADSQAKKHGHTDLSIYREWVDNNPTVFTGFEELDSQSKVLGLLSDGAKISEATEGQEVEVILDQSPLYAESGGQLGDRGQILLGDTVLDVHDVQKIGKKLWVHKALVANGGLAVGDEVVASVDKQWRHAARQAHTATHLIHAALRQVLGPTALQAGSMNKPGYLRFDFNYTEQLTPAQVEQIQAITNEAVDTDWAVNTVETSLEEAKAMGAMALFGENYGSTVRVVEIGGPFSMELCGGTHVAHSSQIGPVALLGESSIGSGVRRIEAYSGLNSFNYLSKERALAEGLASSLKAPSEELPERVAQLVDKLKAAEKEIEALHRQQLMAQTADLLNNAQEIGGVTTLLLRVKDNTNAGDLRTIATTLKDKLGDREGVLVIASDNAGKVPFVVAATKAAVARGAHSGNLVKLVGSYIDGRGGGKADLAQGSGANIAGLESAFGAVRAEIEAL

SEQ ID NO: 275 - DNA, 1773 bp, Corynebacterium glutamicum
  CDS (101)..(1750): RXN00975
tatacagagaccaatgatttttcattaaaaaggcagggatttgttataagtatgggtcgtattctgtgcgacgggtgtacctcggctagaatttctccccatgacaccagctgatctcgcaacattgattaaagagaccgcggtagaggttttgacctcccgcgagctcgatacttctgttcttccggagcaggtagttgtggagcgtccgcgtaacccagagcacggcgattacgccaccaacattgcattgcaggtggctaaaaaggtcggtcagaaccctcgggatttggctacctggctggcagaggcattggctgcagatgacgccattgattctgctgaaattgctggcccaggctttttgaacattcgccttgctgcagcagcacagggtgaaattgtggccaagattctggcacagggcgagactttcggaaactccgatcacctttcccacttggacgtgaacctcgagttcgtttctgcaaacccaaccggacctattcaccttggcggaacccgctgggctgccgtgggtgactctttgggtcgtgtgctggaggcttcctccgcgaaagtgacccgcgaatactacttcaacgatcacggtcgccagatcgatcgtttcgctttgtcccttcttgcagcggcgaagggcgagccaacgccagaagacggttatggcggcgaatacattaaggaaattgcggaggcaatcgtcgaaaagcatcctgaagcgttggctttggagcctgccgcaacccaggagcttttccgcgctgaaggcgtggagatgatgttcgagcacatcaaatcttccctgcatgagttcggcaccgatttcgatgtctactaccacgagaactccctgttcgagtccggtgcggtggacaaggccgtgcaggtgctgaaggacaacggcaacctgtacgaaaacgagggcgcttggtggctgcgttccaccgaattcggcgatgacaaagaccgcgtggtgatcaagtctgacggcgacgcagcctacatcgctggcgatatcgcgtacgtggctgataagttctcccgcggacacaacctaaacatctacatgttgggtgctgaccaccatggttacatcgcgcgcctgaaggcagcggcggcggcacttggctacaagccagaaggcgttgaagtcctgattggccagatggtgaacctgcttcgcgacggcaaggcagtgcgtatgtccaagcgtgcaggcaccgtggtcaccctagatgacctcgttgaagcaatcggcatcgatgcggcgcgttactccctgatccgttcctccgtggattcttccctggatatcgatctcggcctgtgggaatcccagtcctccgacaaccctgtgtactacgtgcagtacggacacgctcgtctgtgctccatcgcgcgcaaggcagagaccttgggtgtcaccgaggaaggcgcagacctatctctactgacccacgaccgcgaaggcgatctcatccgcacactcggagagttcccagcagtggtgaaggctgccgctgacctacgtgaaccacaccgcattgcccgctatgctgaggaattagctggaactttccaccgcttctacgattcctgccacatccttccaaaggttgatgaggatacggcaccaatccacacagcacgtctggcacttgcagcagcaacccgccagaccctcgctaacgccctgcacctggttggcgtttccgcaccggagaagatgtaacaatggctacagttgaaaat

SEQ ID NO: 276 - protein, 550 aa, Corynebacterium glutamicum
MTPADLATLIKETAVEVLTSRELDTSVLPEQVVVERPRNPEHGDYATNIALQVAKKVGQNPRDLATWLAEALAADDAIDSAEIAGPGFLNIRLAAAAQGEIVAKILAQGETFGNSDHLSHLDVNLEFVSANPTGPIHLGGTRWAAVGDSLGRVLEASSAKVTREYYFNDHGRQIDRFALSLLAAAKGEPTPEDGYGGEYIKEIAEAIVEKHPEALALEPAATQELFRAEGVEMMFEHIKSSLHEFGTDFDVYYHENSLFESGAVDKAVQVLKDNGNLYENEGAWWLRSTEFGDDKDRVVIKSDGDAAYIAGDIAYVADKFSRGHNLNIYMLGADHHGYIARLKAAAAALGYKPEGVEVLIGQMVNLLRDGKAVRMSKRAGTVVTLDDLVEAIGIDAARYSLIRSSVDSSLDIDLGLWESQSSDNPVYYVQYGHARLCSIARKAETLGVTEEGADLSLLTHDREGDLIRTLGEFPAVVKAAADLREPHRIARYAEELAGTFHRFYDSCHILPKVDEDTAPIHTARLALAAATRQTLANALHLVGVSAPEKM

SEQ ID NO: 277 - DNA, 877 bp, Corynebacterium glutamicum
  CDS (101)..(877): FRXA00975
tcttgcagcggcgaagggcgagccaacgccagaagacggttatggcggcgaatacattaaggaaattgcggaggcaatcgtcgaaaagcatcctgaagcgttggctttggagcctgccgcaacccaagagcttttccgcgctgaaggcgtggagatgatgttcgagcacatcaaatcttccctgcatgagttcggcaccgatttcgatgtctactaccacgagaactccctgttcgagtccggtgcggtggacaaggccgtgcaggtgctgaaggacaacggcaacctgtacgaaaacgagggcgcttggtggctgcgttccaccgaattcggcgatgacaaagaccgcgtggtgatcaagtctgacggcgacgcagcctacatcgctggcgatatcgcgtacgtggctgataagttctcccgcggacacaacctaaacatctacatgttgggtgctgaccaccatggttacatcgcgcgcctgaaggcagcggcggcggcacttggctacaagccagaaggcgttgaagtcctgattggccagatggtgaacctgcttcgcgacggcaaggcagtgcgtatgtccaagcgtgcaggcaccgtggtcaccctagatgacctcgttgaagcaatcggcatcgatgcggcgcgttactccctgatccgttcctccgtggattcttccctggatatcgatctcggcctgtgggaatcccagtcctccgacaaccctgtgtactacgtgcagtacggacacgctcgtctgtgctccatcgcgcgcaaggcagagaccttgggtgtcaccgaggaaggcgcagacctatctctactgacccacgaccgcgaaggtgatctcatccgcacactcggagagttc

SEQ ID NO: 278 - protein, 259 aa, Corynebacterium glutamicum
LALEPAATQELFRAEGVEMMFEHIKSSLHEFGTDFDVYYHENSLFESGAVDKAVQVLKDNGNLYENEGAWWLRSTEFGDDKDRVVIKSDGDAAYIAGDIAYVADKFSRGHNLNIYMLGADHHGYIARLKAAAAALGYKPEGVEVLIGQMVNLLRDGKAVRMSKRAGTVVTLDDLVEAIGIDAARYSLIRSSVDSSLDIDLGLWESQSSDNPVYYVQYGHARLCSIARKAETLGVTEEGADLSLLTHDREGDLIRTLGEF

SEQ ID NO: 279 - DNA, 723 bp, Corynebacterium glutamicum
  CDS (101)..(700): FRXA00976
tatacagagaccaatgatttttcattaaaaaggcagggatttgttataagtatgggtcgtattctgtgcgacgggtgtacctcggctagaatttctccccatgacaccagctgatctcgcaacattgattaaagagaccgcggtagaggttttgacctcccgcgagctcgatacttctgttcttccggagcaggtagttgtggagcgtccgcgtaacccagagcacggcgattacgccaccaacattgcattgcaggtggctaaaaaggtcggtcagaaccctcgggatttggctacctggctggcagaggcattggctgcagatgacgccattgattctgctgaaattgctggcccaggctttttgaacattcgccttgctgcagcagcacagggtgaaattgtggccaagattctggcacagggcgagactttcggaaactccgatcacctttcccacttggacgtgaacctcgagttcgtttctgcaaacccaaccggacctattcaccttggcggaacccgctgggctgccgtgggtgactctttgggtcgtgtgctggaggcttccggcgcgaaagtgacccgcgaatactacttcaacgatcacggtcgccagatcgatcgtttcgctttgtcgagttcttgcagcggcgaagggcgagccaacgccagaagacggttatggcggcgaatacattaaggaaattgcggaggcaatcg

SEQ ID NO: 280 - protein, 200 aa, Corynebacterium glutamicum
MTPADLATLIKETAVEVLTSRELDTSVLPEQVVVERPRNPEHGDYATNIALQVAKKVGQNPRDLATWLAEALAADDAIDSAEIAGPGFLNIRLAAAAQGEIVAKILAQGETFGNSDHLSHLDVNLEFVSANPTGPIHLGGTRWAAVGDSLGRVLEASGAKVTREYYFNDHGRQIDRFALSSSCSGEGRANARRRLWRRIH

SEQ ID NO: 281 - DNA, 1804 bp, Corynebacterium glutamicum
  CDS (101)..(1804): RXN01730
tctgggctgcatgcccgccctttttgggcggttgagcttattgtttaaggctccagaaaccatcgactgatcaaaaccaagcggaaggacttccaccaacgtgctgcgcactcatctctcaggcgagcttcgtaaagaaaacgcaggccagtcagttactctgaccggctgggtcaatcgtcgccgtgaccacggtggcgtgatcttcatcgatcttcgcgaccgtactggcattgcccaggttgttttccgcaatgaggacgttgctgagcgtgcacacgcactgcgcagcgaattcgtcctacgcgtcaccggcgtcgtcgaagagcgcccagaaggctctcaaaaccctaaccttgcatccggcgacattgaagtcagcgtcaccgaatttgaggtactcaacgagtccgctccacttcctttccagatcgaggattcctcctctgctggtgaagtcggcgaagagacccgtctgaagtaccgctacctggacctgcgtcgcccagttcaggcgaacgccctgcgtctgcgttctgctgccaacaaggctgcacgcaccgtgctggacagccacgatttcaccgagatcgagaccccaaccttgactcgttccaccccagaaggcgcacgtgacttcctggtgccagctcgtctgcgcccaggcactttctacgcattgccacagtccccacagctgttcaagcagctgctgcaggttgctggcatggagcgctactaccagatcgctcgttgctaccgcgatgaggatttccgtgcagaccgtcagccagagttcacccagctggacgttgaaatgtccttcgtggaccaggatgatgtcatcgcactgggcgaggagatcatctctgaggtgtggaagttgatcggatatgagatcaagactccaatcccacgcatgacctacgccgatgcaatgcgtcgctacggctccgacaagccagacctgcgcttcgacatcgaaatcaccgagtgcaccgagttcttccaggacaccacattccgtgtgttcaagaacgaatatgtcggcgcagttgtcatgaccggtggtgcttcccagcctcgccgtcagctcgacgcatggcaggaatgggccaagcagcgcggtgctaagggacttgcttacatcctcgttggtgaagacggcgagctgtccggacctgtggctaagaacatcaccgacgctgagcgcgcaggaatcgcagctcacgttggcgcacagccaggcgactgcatcttcttcgcagcaggagacaccaagtcttccctcgcactgctcggtgcagctcgtggcgagatcgctaagaagctcgacctgatcaaggaaggcgactgggcattcacctggatcgttgacgctccaatgttcgagccagcagcagacgccaccgcatccggtgacgttgcactgggtaactccaagtggaccgcagtccaccacgccttcacctcacctaagccagagttcctggacaactttgacaccaacccaggtgacgcacttgcttatgcatacgacatcgtgtgcaacggcaatgaaatcggtggcggttccatccgtatccaccagcgcgacgttcaggaacgcgttttcgaggttatgggcatcaccggtgaagaagcacgcgagaagttcggcttcctgcttgacgccttcgcattcggcgcacctccacacggcggaatcgcattcggctgggaccgcatcgtgtccctgctgggcggctttgactccatccgcgacgtcatcgcgttccctaagtccggtggcggaatcgacccc

SEQ ID NO: 282 - protein, 568 aa, Corynebacterium glutamicum
VLRTHLSGELRKENAGQSVTLTGWVNRRRDHGGVIFIDLRDRTGIAQVVFRNEDVAERAHALRSEFVLRVTGVVEERPEGSQNPNLASGDIEVSVTEFEVLNESAPLPFQIEDSSSAGEVGEETRLKYRYLDLRRPVQANALRLRSAANKAARTVLDSHDFTEIETPTLTRSTPEGARDFLVPARLRPGTFYALPQSPQLFKQLLQVAGMERYYQIARCYRDEDFRADRQPEFTQLDVEMSFVDQDDVIALGEEIISEVWKLIGYEIKTPIPRMTYADAMRRYGSDKPDLRFDIEITECTEFFQDTTFRVFKNEYVGAVVMTGGASQPRRQLDAWQEWAKQRGAKGLAYILVGEDGELSGPVAKNITDAERAGIAAHVGAQPGDCIFFAAGDTKSSLALLGAARGEIAKKLDLIKEGDWAFTWIVDAPMFEPAADATASGDVALGNSKWTAVHHAFTSPKPEFLDNFDTNPGDALAYAYDIVCNGNEIGGGSIRIHQRDVQERVFEVMGITGEEAREKFGFLLDAFAFGAPPHGGIAFGWDRIVSLLGGFDSIRDVIAFPKSGGGIDP

SEQ ID NO: 283 - DNA, 1777 bp, Corynebacterium glutamicum
  CDS (101)..(1777): FRXA01730
tctgggctgcatgcccgccctttttgggcggttgagcttattgtttaaggctccagaaaccatcgactgatcaaaaccaagcggaaggacttccaccaacgtgctgcgcactcatctctcaggcgagcttcgtaaagaaaacgcaggccagtcagttactctgaccggctgggtcaatcgtcgccgtgaccacggtggcgtgatcttcatcgatcttcgcgaccgtactggcattgcccaggttgttttccgcaatgaggacgttgctgagcgtgcacacgcactgcgcagcgaattcgtcctacgcgtcaccggcgtcgtcgaagagcgcccagaaggctctcaaaaccctaaccttgcatccggcgacattgaagtcagcgtcaccgaatttgaggtactcaacgagtccgctccacttcctttccagatcgaggattcctcctctgctggtgaagtcggcgaagagacccgtctgaagtaccgctacctggacctgcgtcgcccagttcaggcgaacgccctgcgtctgcgttctgctgccaacaaggctgcacgcaccgtgctggacagccacgatttcaccgagatcgagaccccaaccttgactcgttccaccccagaaggcgcacgtgacttcctggtgccagctcgtctgcgcccaggcactttctacgcattgccacagtccccacagctgttcaagcagctgctgcaggttgctggcatggagcgctactaccagatcgctcgttgctaccgcgatgaggatttccgtgcagaccgtcagccagagttcacccagctggacgttgaaatgtccttcgtggaccaggatgatgtcatcgcactgggcgaggagatcatctctgaggtgtggaagttgatcggatatgagatcaagactccaatcccacgcatgacctacgccgatgcaatgcgtcgctacggctccgacaagccagacctgcgcttcgacatcgaaatcaccgagtgcaccgagttcttccaggacaccacattccgtgtgttcaagaacgaatatgtcggcgcagttgtcatgaccggtggtgcttcccagcctcgccgtcagctcgacgcatggcaggaatgggccaagcagcgcggtgctaagggacttgcttacatcctcgttggtgaagacggcgagctgtccggacctgtggctaagaacatcaccgacgctgagcgcgcaggaatcgcagctcacgttggcgcacagccaggcgactgcatcttcttcgcagcaggagacaccaagtcttccctcgcactgctcggtgcagctcgtggcgagatcgctaagaagctcgacctgatcaaggaaggcgactgggcattcacctggatcgttgacgctccaatgttcgagccagcagcagacgccaccgcatccggtgacgttgcactgggtaactccaagtggaccgcagtccaccacgccttcacctcacctaagccagagttcctggacaactttgacaccaacccaggtgacgcacttgcttatgcatacgacatcgtgtgcaacggcaatgaaatcggtggcggttccatccgtatccaccagcgcgacgttcaggaacgcgttttcgaggttatgggcatcaccggtgaagaagcacgcgagaagttcggcttcctgcttgacgccttcgcattcggcgcacctccacacggcggaatcgcattcggctgggaccgcatcgtgtccctgctgggcggctttgactccatccgcgacgtcatcgcgttc

SEQ ID NO: 284 - protein, 559 aa, Corynebacterium glutamicum
VLRTHLSGELRKENAGQSVTLTGWVNRRRDHGGVIFIDLRDRTGIAQVVFRNEDVAERAHALRSEFVLRVTGVVEERPEGSQNPNLASGDIEVSVTEFEVLNESAPLPFQIEDSSSAGEVGEETRLKYRYLDLRRPVQANALRLRSAANKAARTVLDSHDFTEIETPTLTRSTPEGARDFLVPARLRPGTFYALPQSPQLFKQLLQVAGMERYYQIARCYRDEDFRADRQPEFTQLDVEMSFVDQDDVIALGEEIISEVWKLIGYEIKTPIPRMTYADAMRRYGSDKPDLRFDIEITECTEFFQDTTFRVFKNEYVGAVVMTGGASQPRRQLDAWQEWAKQRGAKGLAYILVGEDGELSGPVAKNITDAERAGIAAHVGAQPGDCIFFAAGDTKSSLALLGAARGEIAKKLDLIKEGDWAFTWIVDAPMFEPAADATASGDVALGNSKWTAVHHAFTSPKPEFLDNFDTNPGDALAYAYDIVCNGNEIGGGSIRIHQRDVQERVFEVMGITGEEAREKFGFLLDAFAFGAPPHGGIAFGWDRIVSLLGGFDSIRDVIAF

SEQ ID NO: 285 - DNA, 1503 bp, Corynebacterium glutamicum
  CDS (101)..(1480): RXA00314
agcgggagccaacctgctcaacgtcgcaaagaaagaagcggtgccagcaacaccataagttgaaaccttgagtgttcgcacacaggttagactaggggacgtgactctacgcatctttgacaccggtacccgtacgcttcgagattttaaacctgttcaaccaggtcatgcctcggtgtacctgtgtggtgccaccccgcaatcttcaccccacattggacatgttcgttcagcagtagcgtttgatattttgcgccgctggctcatggctaagggacttgatgtggcatttgttcgcaatgtcactgatatcgatgacaagattctcaccaaggcatctgaaaatggtcgcccttggtgggaatgggtgtccacctatgaacgtgaattcacctggacgtacaacacgttgggtgtgcttcctccatcaacggagcctcgtgcaacaggccacgtcactcagatgattaagtacatgcagcgcttgattgataacggctttgcttacgccgttgatggctctgtgtactttgatgtcgcagcgtggtccaaggctgaaggatctgactatggttctttgtccggaaaccgtgttgaagatatggagcagggcgagcccgataactttggtaagcgggggccacaggactttgctctgtggaaggctgccaaaccgggtgagccgtcatggccaaccccttggggagacggccggccgggttggcatttggaatgctctgccatggccacctactatttgggtgagcaatttgatattcactgtggtggtttggatctgcaatttccacaccatgaaaatgaaattgcccaggcacatgcggctggcgataaatttgccaactactggatgcacaatcactgggtaacaatggccggcgagaaaatgtccaagtctttgggcaatgttttggctgtgccggaaatgctaaagcaggttcgtcctgtcgagcttcgttattaccttgggtctgcccattaccgttccgtccttgagtattccgagagcgctttgagtgaagctgcggtgggttaccgtcgcattgagtctttccttgagcgtgtgggggatgttgaggtaggcgagtggacgccaggttttgaagttgcgatggatgaggatattgcagttcctaaggctttggctgaaatccataacgctgtccgcgagggcaatgctgccttggataagggtgatcgtgaggcagcggagaagcttgcttcctcggttcgtgcgatgactggcgttttgggcttcgaccccgttgaatggggttcagatgcaggcgctgatggcaaggcagataaggcgcttgatgtgctgatttcttcggagcttgagcgtcgtgcaactgctcgtgctgagaagaattgggcggttgctgatgaggttcgagatcgtcttgccgatgctggtattgaggttgtggataccgcagatggcgctacatggaaattgcagtaattacagacacttttaaggag

SEQ ID NO: 286 - protein, 460 aa, Corynebacterium glutamicum
VTLRIFDTGTRTLRDFKPVQPGHASVYLCGATPQSSPHIGHVRSAVAFDILRRWLMAKGLDVAFVRNVTDIDDKILTKASENGRPWWEWVSTYEREFTWTYNTLGVLPPSTEPRATGHVTQMIKYMQRLIDNGFAYAVDGSVYFDVAAWSKAEGSDYGSLSGNRVEDMEQGEPDNFGKRGPQDFALWKAAKPGEPSWPTPWGDGRPGWHLECSAMATYYLGEQFDIHCGGLDLQFPHHENEIAQAHAAGDKFANYWMHNHWVTMAGEKMSKSLGNVLAVPEMLKQVRPVELRYYLGSAHYRSVLEYSESALSEAAVGYRRIESFLERVGDVEVGEWTPGFEVAMDEDIAVPKALAEIHNAVREGNAALDKGDREAAEKLASSVRAMTGVLGFDPVEWGSDAGADGKADKALDVLISSELERRATARAEKNWAVADEVRDRLADAGIEVVDTADGATWKLQ

SEQ ID NO: 287 - DNA, 1383 bp, Corynebacterium glutamicum
  CDS (101)..(1360): RXA02204
taggacgtgtctccgcgctgaacttgtgcaatgagcctgcacatagcttgcaaatagcttgtcgcggaaataattacggaaagaagatagagtaaaacccatgcaatcttggcctacacctgaagtacctgctctcgctggcacgcctgtgcctttggaattgttcgacactgcagatcaggaagtacgcctggttgaaaccccacctgccggatccgacacaccggttggcatgtacgtctgtggcatcactccctacgactccacacacttggggcacgcggcgacatacctcgctttcgatctgatctaccgcatcctgctggacaatgatcacgatgtccactacgtccaaaacatcaccgatgtcgatgaccctctgtttgaacgcgcagcccgcgacggcgtcgactggcgcgacctcggcaccagccaaatcaacctcttccgcagcgatatggaagccctgagcatcattccgccgaaggactacatcggtgcgattgagtccatcgacgaagtcattgagatggtcaagacgcttctcgacgaaggcgccgcgtacatcgtcgaggacgccgaatatccagatgtctacgcatcaatcaacgccacagacaaatttggctacgagtccaattacgacgcagcgaccatggctgagttcttcgcagaacgcggcggcgacccagagcgtcccggcaagaaaaaccccatggatgccctcctgtggcgcgcagcccgcgaaggtgaaccaagctgggaatccccattcggcgcaggtcgtcctggctggcacatcgagtgttcagcaatcgctaccaaccgcctaggacacagctttgatatccaaggtggcggctctgacctgatcttccctcaccacgagttctccgcagcgcacgccgaagcagctcacggtgtcgagcgcatggctaagcactacgtccacgctggcatgatatcccaagatggcgtgaaaatgtccaagtctttgggcaacctggaatttgtttcccgcctcaccgctgcaggccacgagcccggcgcgatccgcctcggtgtttttgccaaccattaccgtggcaaccgtgattggaacgcagagagcctcgccaccgcagaacagcgtctagcaacctggcgtgaagcagcacgagctgcaaccaatagggaagatgccattgcagttgtcgagcagcttcgtgcacacctatctgctgaccttgatactcccggcgcgctcgccgcggtagataattgggcagcgggtatcgacaccacgaccgattcaaaagagttcaccgaggtaggaaacatcgtggtcgcagccattgatgccctcctgggcgtgcagctctaggaaatttcaggaacaataca

SEQ ID NO: 288 - protein, 420 aa, Corynebacterium glutamicum
MQSWPTPEVPALAGTPVPLELFDTADQEVRLVETPPAGSDTPVGMYVCGITPYDSTHLGHAATYLAFDLIYRILLDNDHDVHYVQNITDVDDPLFERAARDGVDWRDLGTSQINLFRSDMEALSIIPPKDYIGAIESIDEVIEMVKTLLDEGAAYIVEDAEYPDVYASINATDKFGYESNYDAATMAEFFAERGGDPERPGKKNPMDALLWRAAREGEPSWESPFGAGRPGWHIECSAIATNRLGHSFDIQGGGSDLIFPHHEFSAAHAEAAHGVERMAKHYVHAGMISQDGVKMSKSLGNLEFVSRLTAAGHEPGAIRLGVFANHYRGNRDWNAESLATAEQRLATWREAARAATNREDAIAVVEQLRAHLSADLDTPGALAAVDNWAAGIDTTTDSKEFTEVGNIVVAAIDALLGVQL

SEQ ID NO: 289 - DNA, 1532 bp, Corynebacterium glutamicum
  CDS (1)..(1509): RXA01124
cggtgggtgcgggctattaacatggcctgcatgactgatgttcgtgttcgtttctgcccatcgcccaccggcaccccacacgttggacttgtgcgcaccgcgctgttcaactgggcatatgctcgccacactggaggcaagttagttttccgcattgaggacactgacgctgcccgcgattccgaggagtcttactccgccatcatcgattccctgcgctggttgggaatggactgggatgagggtgtggaaaagggcggcccgcatgagccctaccgccagtcgcagcgcaaggacatctatcaggatgtgttgaagcagcttatcgacgccggtgaagtctacccagcttattccaccgcggaagaggttgaggagcgacacaaggctgctggccgcgatccaaagctcggctacgacaactttgaccgtgatctcaccgaagagcaggtcgcagcatttgaggctgaggggcgtaagcctgtgtggcgtctgcgcatgccagagcaggattggaagtggactgacctggtccgcggtgaagttgagttcaagtcgttcacccagcctgacttcgtggttgctcgttccaacggtgagcctttgtacaccctggtcaaccctgttgatgatgcgttgatggaagtcacccatgtgctgcgtggtgaggatcttttgccatcgactcctcgtcagcttgctctgtatgaggcgctcaagcgcattggcgtggcaaaggccaccccagcctttggtcacctgccatttgtgatgggtgagggcaacaagaagctgtctaagcgtgatccacagtccagcctgttcaaccaccgtgacaacggcatcatcccagagggcatgctcaactacctggcgctgctgggttggtcactgtctgctgatcaggacattttcggtgtcgatgagttgatcgctaactttgatgtcgctgacgtgttgggcaacccagctcgctttgaccagaagaagcttgaggccatcaacgcggatcacatccgacttctggagcctaaggatttcgaggctcgcctgcgcgcgtacatgactgagtacaccgagttcccagcggattacccagctgagaagtttgccattgctgcggagctggttcagacccgcatcaaggtgctcagcgaggcgtgggatctgctgaagttcctggtcaccgctgacgaagatctggtgttcaatgagaaggctgccaagaagaacctcaaggagaccgctgttgagcctctcaacgccggtatcgcagcgctggaggcagtggaggagtggaccactccaaacattgaagcagcattgaacaaggctctcattgaggatctaggcctgaagcctcgcgtggcgttcggtgcgttgcgcattggtatctccggcgaggctgtatccccaccactgtttgagtccatggagcttttgggcaaggaatccacgttggttcgtctgaaggttactcgtgagcagaccccattcgtggtcgctgagtaaaacctgtagatgaacaaaag

SEQ ID NO: 290 - protein, 503 aa, Corynebacterium glutamicum
RWVRAINMACMTDVRVRFCPSPTGTPHVGLVRTALFNWAYARHTGGKLVFRIEDTDAARDSEESYSAIIDSLRWLGMDWDEGVEKGGPHEPYRQSQRKDIYQDVLKQLIDAGEVYPAYSTAEEVEERHKAAGRDPKLGYDNFDRDLTEEQVAAFEAEGRKPVWRLRMPEQDWKWTDLVRGEVEFKSFTQPDFVVARSNGEPLYTLVNPVDDALMEVTHVLRGEDLLPSTPRQLALYEALKRIGVAKATPAFGHLPFVMGEGNKKLSKRDPQSSLFNHRDNGIIPEGMLNYLALLGWSLSADQDIFGVDELIANFDVADVLGNPARFDQKKLEAINADHIRLLEPKDFEARLRAYMTEYTEFPADYPAEKFAIAAELVQTRIKVLSEAWDLLKFLVTADEDLVFNEKAAKKNLKETAVEPLNAGIAALEAVEEWTTPNIEAALNKALIEDLGLKPRVAFGALRIGISGEAVSPPLFESMELLGKESTLVRLKVTREQTPFVVAE

SEQ ID NO: 291 - DNA, 736 bp, Corynebacterium glutamicum
  CDS (101)..(736): RXN00458
cacccctgaaaacctcctcaactatcccggagtgatcatctccaccgttcaggagaacccatccgaaacatggcggcaagtgaacatctaatctagaaacatggcaggacgatacgcaccatcaccaagcggcgaccttcactttggcaacctccgcacagcactgctggcctggctgttcgcgcgctccgaaggaaaaaaattcctcatgcgggtcgaagacatcgatgaacaacgctcatccaaggaatccgccgaaagccaactcgcagacctatccgccctgggtctcgattgggatggcgacgtcctctaccaatccacacgctacgacgcctaccgcgcagcccttgaaaaactagacacctacgaatgttattgctcgcgccgggacatccaagaagcctcgcgggcaccccatgtggctccgggagtgtatccgggaacgtgtaggggattgaaggaggaggaacgcgtcgaaaagcgtgcaaccttggctgcgcaaaaccggcaccccgccattcgcctgcgcgcgcaggtaacctcgtttgattttcacgaccgacttcgcggcccacaaactggccccgtagacgatttcattctgctccgcggcgggcaggaacccggatgggcatacaacttaactgtcgtcgtcgacgatgcctaccaaggcgttgaccaggtagtccgcggcgacgacctactcgaattcggcgcgcgccaagctaccttg

SEQ ID NO: 292 - protein, 212 aa, Corynebacterium glutamicum
MAGRYAPSPSGDLHFGNLRTALLAWLFARSEGKKFLMRVEDIDEQRSSKESAESQLADLSALGLDWDGDVLYQSTRYDAYRAALEKLDTYECYCSRRDIQEASRAPHVAPGVYPGTCRGLKEEERVEKRATLAAQNRHPAIRLRAQVTSFDFHDRLRGPQTGPVDDFILLRGGQEPGWAYNLTVVVDDAYQGVDQVVRGDDLLEFGARQATL

SEQ ID NO: 293 - DNA, 328 bp, Corynebacterium glutamicum
  CDS (101)..(328): FRXA00458
cacccctgaaaacctcctcaactatcccggagtgatcatctccaccgttcaggagaacccatccgaaacatggcggcaagtgaacatctaatctagaaacatggcaggacgatacgcaccatcaccaagcggcgaccttcactttggcaacctccgcacagcactgctggcctggctgttcgcgcgctccgaaggaaaaaaattcctcatgcgggtcgaagacatcgatgaacaacgctcattcaaggaatccgccgaaagccaactcgcagacctatccgccctgggtctcgattgggatggcgacgtcctctaccaatccacacgc

SEQ ID NO: 294 - protein, 76 aa, Corynebacterium glutamicum
MAGRYAPSPSGDLHFGNLRTALLAWLFARSEGKKFLMRVEDIDEQRSFKESAESQLADLSALGLDWDGDVLYQSTR

SEQ ID NO: 295 - DNA, 1506 bp, Corynebacterium glutamicum
  CDS (101)..(1483): RXA00069
gggtcagcggaagcaacatcgttagttgggctaggattggttgggtatgtcctaaaagggacggttattttttcattcgacgtggaggagagcatccgacgtggctcagcaatcgatcatcgacaccgtggttaacctgtgtaaacgacgtggactggtgtacccctgtggtgagatctacggcggtacccgctctgcgtgggactacggcccgctgggtgtggagctgaaggaaaacatcaagcgccagtggtggcgttctatggttacttcccgcccagatgttgtgggtgttgatacttctgtcatccttcctcgccaggtgtgggtaacttccggccacgttgaggtcttcactgacccactggttgagtctttgaacacccacaagcgttaccgtgcggaccacctgctggagcagtacgaagagaagcatggtcacccacctgtaaacggcttggctgacatcaacgatccagagaccggccagccaggtaactggactgagcctaaggcgttctctggtcttctgaagactttcttgggacctgtggacgacgaagagggtctgcactacctgcgccctgaaactgctcagggtatcttcgtgaacttcaagaacgtgatgaacacttcacgtatgaagccacctttcggtatcgcgaacatcggtaagtctttccgtaacgagatcaccccaggtaacttcattttccgtactcgtgagttcgagcagatggagatggagttcttcgtcaagcctggtgaggacgaagagtggcaccagcactggattgatactcgcctgcagtggtacatcaacctgggcattaagcctgagaacctgcgtctgtacgagcaccctcaggagaagctgtctcactactccaagcgcactgttgatattgagtacgcattcaactttgctaacaccaagtggggcgagttggaggggatcgcgaaccgtactgattacgatcttcgcgtgcactctgagggctctggtgaggacctgtcattcttcgatcaggagaccaatgagcgttggattcctttcgtaatcgagcctgctgcaggtcttggtcgcgcaatgatgatgttcctgatggatgcttatcacgaggacgaagcaccaaactcaaagggtggcgtcgataagcgtgttgttctgaagcttgaccgtcgccttgcgccggttaaggttgcggtcttgccgctgtcaaagaaggacactttgacgcctttggcggaaaagctcgcagcagagctgcgtgaattctggaacgttgattacgacacttcaggtgcgattggtcgccgttaccgtcgtcaggacgagatcggtactccattctgcgtcaccgttgactttgattctctcgaggacaacgctgtgaccgtgcgtgagcgcgacaccatggagcaggttcgtgttccacttgatgagctgcagggttacttggctcagcgcctcatcggctgctaaacggcaaccaatagagcgat

SEQ ID NO: 296 - protein, 461 aa, Corynebacterium glutamicum
VAQQSIIDTVVNLCKRRGLVYPCGEIYGGTRSAWDYGPLGVELKENIKRQWWRSMVTSRPDVVGVDTSVILPRQVWVTSGHVEVFTDPLVESLNTHKRYRADHLLEQYEEKHGHPPVNGLADINDPETGQPGNWTEPKAFSGLLKTFLGPVDDEEGLHYLRPETAQGIFVNFKNVMNTSRMKPPFGIANIGKSFRNEITPGNFIFRTREFEQMEMEFFVKPGEDEEWHQHWIDTRLQWYINLGIKPENLRLYEHPQEKLSHYSKRTVDIEYAFNFANTKWGELEGIANRTDYDLRVHSEGSGEDLSFFDQETNERWIPFVIEPAAGLGRAMMMFLMDAYHEDEAPNSKGGVDKRVVLKLDRRLAPVKVAVLPLSKKDTLTPLAEKLAAELREFWNVDYDTSGAIGRRYRRQDEIGTPFCVTVDFDSLEDNAVTVRERDTMEQVRVPLDELQGYLAQRLIGC

SEQ ID NO: 297 - DNA, 1410 bp, Corynebacterium glutamicum
  CDS (101)..(1387): RXA01852
aaccaccaccatgcgtgcagaacgcactggtaaccctttcttgctggcactgtagggctaagttccgtactacttcttcgaataggtatcgttaataatcgtgagtcaaaacaagtccaagtctgaaaagcttcagtcatttgctgcacccaagggtgttcctgattacgccccaccaaaatctgcagcgtttttagcagtccgtgatgcctttgttaatcaagcacataaggccgggtttgagcatattgagctgccgatctttgaagacaccggcttgtttgcgcgtggtgttggtgagtccactgacgtagtgagcaaggaaatgtacaccttcgctgatcgtggcgagcgctctgtcacgctgcgcccagaaggcactgcaggcgtgatgcgtgcagttattgaacacagcctggaccgtggacagcttcccgtaaagctgaactacgccggaccattcttccgttatgagcgtcctcaggcagggcgttaccgtcagcttcagcaagtaggcgtagaggcaattggtgtggatgatccagcgcttgatgcggagatcattgcgcttgctgatcgttcttaccgcagcttggggctgcaggatttccgtctggagctcaccagcttgggtgatcgtcactgccgtcccgagtatcgtcagaagctgcaggatttcttgtttgcacttcctttggatgaggaaacccgcaagcgcgcagagatcaacccacttcgggtgttggatgataagcgtcctgaagtccaagagatgactgcggatgcaccattgatgctggatcaccttgatgcagagtgccgtgagcactttgaaacagtgactggtttgctcgatgacatgggtgttccatatgtgattaacccacgcatggttcgtggtttggattactacaccaagacttgttttgagttcgttcacgatggcctgggcgcacagtctggcattggtggcggcggacgctacgacggtctgatggcacagcttggcggacaggatctgtctggcatcggctatggcctgggtgtggatcgcaccatgttggctctggaagctgaaggtgtgactgttggtgctgagcgtcgcgttgatgtgtacggcgttccactgggcaaggatgctaagaaggctcttgctggaatcgtgaacacgctgcgcgctgcgggtatttccaccgatatgtcttacggcgaccgtggcctgaagggtgccatgaagggcgctgaccgctccaacgcgttgtacaccttggtgctgggcgagcaggagctggagaacaacaccatcgcggtgaaggatatgcgtgcgcatgagcagcacgatgtcgcattggacgaggttgtggcctttttgcaggggaaacttatttaaataattcataagtaaaaaac

SEQ ID NO: 298 - protein, 429 aa, Corynebacterium glutamicum
VSQNKSKSEKLQSFAAPKGVPDYAPPKSAAFLAVRDAFVNQAHKAGFEHIELPIFEDTGLFARGVGESTDVVSKEMYTFADRGERSVTLRPEGTAGVMRAVIEHSLDRGQLPVKLNYAGPFFRYERPQAGRYRQLQQVGVEAIGVDDPALDAEIIALADRSYRSLGLQDFRLELTSLGDRHCRPEYRQKLQDFLFALPLDEETRKRAEINPLRVLDDKRPEVQEMTADAPLMLDHLDAECREHFETVTGLLDDMGVPYVINPRMVRGLDYYTKTCFEFVHDGLGAQSGIGGGGRYDGLMAQLGGQDLSGIGYGLGVDRTMLALEAEGVTVGAERRVDVYGVPLGKDAKKALAGIVNTLRAAGISTDMSYGDRGLKGAMKGADRSNALYTLVLGEQELENNTIAVKDMRAHEQHDVALDEVVAFLQGKLI

SEQ ID NO: 299 - DNA, 3057 bp, Corynebacterium glutamicum
  CDS (101)..(3034): RXA02726
cagcgcgatggtgctgaagactacgtcttttacgatggccctccttttgcaaacggtgtgccacactacggccacctactgactggttacgtcaaggacattgttccttgctaccagaccatgccgtgggtaccgcgttcctcgtgtcttcagttgggatacccacggcttgccagctgaacttgaggctgaaaagcagctcggcatcaaggacaagggcgagatcgaggccatgggtcttgccaagttcaacgagtactgtgcaacctccgtgttgcagtacaccaaggaatgggaagagtacgtcacccgccaggctcgttgggtggactttgaaaacggctacaagaccatggacctttctttcatggagtccgtgatctgggcgttcaaggaactctacgacaagggcctgatctaccagggtttccgcgttcttccttactcctgggcagagcacaccccactgtccaaccaggaaacccgactggatgactcctacaagctgcgccaggatccaaccctgaccgtcacgttcccagtcaccggtgtcgtcgaaggttcttctgcaaacgctggcctggtgggagcgttggctcttgcgtggacgactaccccgtggacccttccatccaaccttgcgttggctgtgaacccagcggtgacctacgcattggttgaggttgctgaagacggtgaggcagaattcgtcggcaagcgtgtgcttttggctaaggacctcgttggttcctacgccaaggaactcggtgctgaggctgttatcgtttctgagcacccaggctctgaactggtcggactgacctacgagccaatctttggatatttccgcgatcacgcgaacggattccagatcctcggtgcagagtacgtcaccaccgaagacggcaccggtatcgtccaccaggcaccagctttcggtgaagacgatatgaacacctgtaacgctgccggcattgagccagtcatcccagtggacatcgacggcaagttcaccggtttggttcctgaataccaaggtcagcttgttttcgatgccaacaaggacatcatcaaggacttgaaggctgcaggtcgcgtggttcgccaccagaccatcgaacactcctacccacactcttggcgttccggtgagccactgatctacatggctctgccatcttggtttgtgaatgtcaccgaaatccgcgaccgcatggttgaggtcaaccaggacatcgagtggatgccagcgcacatccgcgacggccagttcggcaagtggctagaaggtgcccgcgactggaacatctcccgttcccgttactggggttcaccaattccagcatgggtctccgacaacgacgaatacccacgcgttgatgtttatggttccctcgatgagcttgaggctgactttggcgtgcgtccaaagtccctgcaccgtccagacatcgatgaactaactcgtccaaacccagacgatccaaccggcaagtccaccatgcgacgcgtcaccgatgttttggacgtgtggttcgactccggttccatgccgtttgcccaggtgcactacccattcgagaacaaagaatggtttgatacccacgcaccagcagacttcatcgtggagtacatcggtcagacccgcggttggttctacctgctgcacgtgctgtccaccgcactgtttgaccgcccagctttcaagaaggttgtcgcacacggcatcgtcttgggtgatgacggactgaagatgtccaagtccaagggcaactacccgaacgtcaacgaggtcttcgaccgcgacggttccgacgccatgcgttggttcctcatgagttccccaatcctgcgcggcggcaacttgattgtcaccgaaaagggcatccgcgaaggtgtgcgccaagcacagcttccaatgtggaacgcatactccttcctgcagctgtacacctccaagaacgcaacctggtcagtcgactccactgacgtgctggaccgctacatcctggcgaagctgcacgatttggtggcagagacccaggcggcactcgacggcactgacattgcaaaggcttgcgacttggttcgtaacttctgtgatgcgttgaccaactggtacgtgcgtcgttcccgcgaccgtttctgggctggtgatgaagcacacccagaggctttcaacaccttgtacaccgtgctggaaaccctcacccgcgtggcagctccactgctgccaatgaccaccgaagtgatctggcgtggactgaccggcgagcgttctgtgcacctgactgatttcccatccgctgagtctttcccagcagatgctgatttggttcgcaccatggatgagatccgtggcgtgtgctctgcggcttcctctgttcgtaaggctcacaagctgcgtaaccgtctgccacttccaggcctgactgttgctcttccagactctgctcgcctggcagacttcgcttcgatcatccgcgatgaggtcaacgtgaagaacgtggatctgacctctgacgtggattccgtgggaaccttcgaggttgttgttaacgctaaggttgcaggtcctcgcttgggcaaggacgtccagcgcgtgatcaaggctgtgaaggctggcaactacacccgcgaaggcgacgtcgttgttgccgatggcatcgagctcaacgagggtgaattcaccgagcgtctcgtagcagcaaaccctgattccaccgcgcagatcgacggcgtggatggactcgtggttctggacatggaagtcacggaagaacttgaagcagaaggctgggcagcggacgcgatccgtggcctgcaggatgctcgaaagaactccggctttgaggtttctgaccgcatttctgttgtcgtcagcgttcctgaggacaagaaggaatggatcaccactcacgctgatcacatcgcagcggaagttttggcaacctcctttgagatcgtcactgatgccctcgacggcgaaacccacgacattgtcgctggtgtgaccgcgaaggttactaagaactaagagttgttttgttgagaaag

SEQ ID NO: 300 - protein, 978 aa, Corynebacterium glutamicum
LFLATRPCRGYRVPRVFSWDTHGLPAELEAEKQLGIKDKGEIEAMGLAKFNEYCATSVLQYTKEWEEYVTRQARWVDFENGYKTMDLSFMESVIWAFKELYDKGLIYQGFRVLPYSWAEHTPLSNQETRLDDSYKLRQDPTLTVTFPVTGVVEGSSANAGLVGALALAWTTTPWTLPSNLALAVNPAVTYALVEVAEDGEAEFVGKRVLLAKDLVGSYAKELGAEAVIVSEHPGSELVGLTYEPIFGYFRDHANGFQILGAEYVTTEDGTGIVHQAPAFGEDDMNTCNAAGIEPVIPVDIDGKFTGLVPEYQGQLVFDANKDIIKDLKAAGRVVRHQTIEHSYPHSWRSGEPLIYMALPSWFVNVTEIRDRMVEVNQDIEWMPAHIRDGQFGKWLEGARDWNISRSRYWGSPIPAWVSDNDEYPRVDVYGSLDELEADFGVRPKSLHRPDIDELTRPNPDDPTGKSTMRRVTDVLDVWFDSGSMPFAQVHYPFENKEWFDTHAPADFIVEYIGQTRGWFYLLHVLSTALFDRPAFKKVVAHGIVLGDDGLKMSKSKGNYPNVNEVFDRDGSDAMRWFLMSSPILRGGNLIVTEKGIREGVRQAQLPMWNAYSFLQLYTSKNATWSVDSTDVLDRYILAKLHDLVAETQAALDGTDIAKACDLVRNFCDALTNWYVRRSRDRFWAGDEAHPEAFNTLYTVLETLTRVAAPLLPMTTEVIWRGLTGERSVHLTDFPSAESFPADADLVRTMDEIRGVCSAASSVRKAHKLRNRLPLPGLTVALPDSARLADFASIIRDEVNVKNVDLTSDVDSVGTFEVVVNAKVAGPRLGKDVQRVIKAVKAGNYTREGDVVVADGIELNEGEFTERLVAANPDSTAQIDGVDGLVVLDMEVTEELEAEGWAADAIRGLQDARKNSGFEVSDRISVVVSVPEDKKEWITTHADHIAAEVLATSFEIVTDALDGETHDIVAGVTAKVTKN

SEQ ID NO: 301 - DNA, 640 bp, Corynebacterium glutamicum
  CDS (101)..(640): RXN00966
tggtttccacataattcttcaagtctatctacttattgaggggaggaagaattgccctccacacatgagatgtcccgtgtacctactacactgtttaaccatgactaacccgagcgaaggcaccactcccctggcgttccgttataccccggaactcgccaacaagatcgaaggtgagtggcagaattactggactgacaacggcacattcaacgcacccaacccagtgggtgatttagcgcctgcggacggtaaagcacttcctgaggacaagctctttgtccaggatatgttcccgtacccatccggagctggcctgcacgtaggccacccactcggttacatcgcaacggatgttttcgcccgctacaaccgcatgctgggcaagaacgttctgcacaccttgggctatgacgccttcggactgccagcagagcagtacgcgatccaaaccggtacacacccacgcaccaccaccatggccaacattgagaacatgaagcgccagctcggtgcgctgggtcttggccatgattcccgtcgtgcggtggccaccacggatcctgagttctacaagtggactcagtggatcttcctgcagattttcaattcgtggttcgatgcagagcagcagaaggca

SEQ ID NO: 302 - protein, 180 aa, Corynebacterium glutamicum
MTNPSEGTTPLAFRYTPELANKIEGEWQNYWTDNGTFNAPNPVGDLAPADGKALPEDKLFVQDMFPYPSGAGLHVGHPLGYIATDVFARYNRMLGKNVLHTLGYDAFGLPAEQYAIQTGTHPRTTTMANIENMKRQLGALGLGHDSRRAVATTDPEFYKWTQWIFLQIFNSWFDAEQQKA

SEQ ID NO: 303 - DNA, 628 bp, Corynebacterium glutamicum
  CDS (101)..(628): FRXA00966
tggtttccacataattcttcaagtctatctacttattgaggggaggaagaattgccctccacacatgagatgtcccgtgtacctactacactgtttaaccatgactaacccgagcgaaggcaccactcccctggcgttccgttataccccggaactcgccaacaagatcgaaggtgagtggcagaattactggactgacaacggcacattcaacgcacccaacccagtgggtgatttagcgcctgcggacggtaaagcacttcctgaggacaagctctttgtccaggatatgttcccgtacccatccggagctggcctgcacgtaggccacccactcggttacatcgcaacggatgttttcgcccgctacaaccgcatgctgggcaagaacgttctgcacaccttgggctatgacgccttcggactgccagcagagcagtacgcgatccaaaccggtacacacccacgcaccaccaccatggccaacattgagaacatgaagcgccagctcggtgcgctgggtcttggccatgattcccgtcgtgcggtggccaccacggatcctgagttctacaagtggactcagtggatcttcctgcagattttcaattcgtggttcgatgcagag

SEQ ID NO: 304 - protein, 176 aa, Corynebacterium glutamicum
MTNPSEGTTPLAFRYTPELANKIEGEWQNYWTDNGTFNAPNPVGDLAPADGKALPEDKLFVQDMFPYPSGAGLHVGHPLGYIATDVFARYNRMLGKNVLHTLGYDAFGLPAEQYAIQTGTHPRTTTMANIENMKRQLGALGLGHDSRRAVATTDPEFYKWTQWIFLQIFNSWFDAE

SEQ ID NO: 305 - DNA, 1061 bp, Corynebacterium glutamicum
  CDS (1)..(1038): RXN01061
atctctcggtaccgagagcagttctgcaacatcgaaaatgaacgctactggaccggcccacgcccagaaacccacggaccaaacgatccaggcggcgtagacctctacgtcggtggcgtcgagcacgcagttctccacctgctctacgcacgtttctggcacaaggtcctcttcgacctgggccacgtctcctccaaggagccataccgtcgcctgtacaaccagggctacatccaggccttcgcctacaccgattcccgtggcgtctacgtgcctgccgatgatgtcgaagagaaggacggaaagttcttctaccagggcgaagaagtcaaccaggaatacggaaagatgggcaagtccctgaagaacgccgttgccccagacgatatctgcaacaacttcggtgctgacaccctgcgcgtttacgagatggccatgggacctttggacacctcccgtccatgggcaaccaaggacgtcgtcggtgcgcagcgcttcctccagcgtctgtggcgtctcgtcgtcgatgaaaacaccggcgaagtgctcactcgcgatgaagtcctcaccgacgatgacaacaagcaactgcaccgcaccatcgcaggcgtccgcgacgactacaccaacttgcgcgttaacaccgtggttgccaagctcatcgaatacgtcaactacctgaccaaaacatacccagacaccatcccagctggcgcagtcctgccactgatcgtcatggtctcccctatcgcaccacacatcgcggaggaactctggaagaagctcggccacgacgacaccgtcacctacgaaccattccccacctttgaggaaaaatggctcaccgacgatgaaatcgaactgccagtccaggtcaacggcaaggtccgcggtcgcatcaccgttgcagccgacgccagccaggagcaggtcatcgaggcagcgcttgccgacgagaaggtgcaggagcaaatctccggcaagaacctgatcaagcagatcgttgttccaggacgcatggttaaccttgtggtgaagtaatccccctcggtttagattcc

SEQ ID NO: 306 - protein, 346 aa, Corynebacterium glutamicum
ISRYREQFCNIENERYWTGPRPETHGPNDPGGVDLYVGGVEHAVLHLLYARFWHKVLFDLGHVSSKEPYRRLYNQGYIQAFAYTDSRGVYVPADDVEEKDGKFFYQGEEVNQEYGKMGKSLKNAVAPDDICNNFGADTLRVYEMAMGPLDTSRPWATKDVVGAQRFLQRLWRLVVDENTGEVLTRDEVLTDDDNKQLHRTIAGVRDDYTNLRVNTVVAKLIEYVNYLTKTYPDTIPAGAVLPLIVMVSPIAPHIAEELWKKLGHDDTVTYEPFPTFEEKWLTDDEIELPVQVNGKVRGRITVAADASQEQVIEAALADEKVQEQISGKNLIKQIVVPGRMVNLVVK

SEQ ID NO: 307 - DNA, 471 bp, Corynebacterium glutamicum
  CDS (1)..(471): FRXA01864
aatgaacgctactggaccggcccacgcccagaaacccacggaccaaacgatccaggcggcgtagacctctacgtcggtggcgtcgagcacgcagttctccacctgctctacgcacgtttctggcacaaggtcctcttcgacctgggccacgtctcctccaaggagccataccgtcgcctgtacaaccagggctacatccaggccttcgcctacaccgattcccgtggcgtctacgtgcctgccgatgatgtcgaagagaaggacggaaagttcttctaccagggcgaagaagtcaaccaggaatacggaaagatgggcaagtccctgaagaacgccgttgccccagacgatatctgcaacaacttcggtgctgacaccctgcgcgtttacgagatggccatgggacctttggacacctcccgtccatgggcaaccaaggacgtcgtcggtgcgcagcgcttcctcagcgtc

SEQ ID NO: 308 - protein, 157 aa, Corynebacterium glutamicum
NERYWTGPRPETHGPNDPGGVDLYVGGVEHAVLHLLYARFWHKVLFDLGHVSSKEPYRRLYNQGYIQAFAYTDSRGVYVPADDVEEKDGKFFYQGEEVNQEYGKMGKSLKNAVAPDDICNNFGADTLRVYEMAMGPLDTSRPWATKDVVGAQRFLSV

SEQ ID NO: 309 - DNA, 505 bp, Corynebacterium glutamicum
  CDS (75)..(482): FRXA01061
gatgaactcctcaccgacgatgacaacaagcaactgcaccgaccatcgcaggcgtccgcgacgactacaccaacttgcgcgttaacaccgtggttgccaagctcatcgaatacgtcaactacctgaccaaaacatacccagacaccatcccagctggcgcagtcctgccactgatcgtcatggtctcccctatcgcaccacacatcgcggaggaactctggaagaagctcggccacgacgacaccgtcacctacgaaccattccccacctttgaggaaaaatggctcaccgacgatgaaatcgaactgccagtccaggtcaacggcaaggtccgcggtcgcatcaccgttgcagccgacgccagccaggagcaggtcatcgaggcagcgcttgccgacgagaaggtgcaggagcaaatctccggcaagaacctgatcaagcagatcgttgttccaggacgcatggttaaccttgtggtgaagtaatccccctcggtttagattcc

SEQ ID NO: 310 - protein, 136 aa, Corynebacterium glutamicum
LRVNTVVAKLIEYVNYLTKTYPDTIPAGAVLPLIVMVSPIAPHIAEELWKKLGHDDTVTYEPFPTFEEKWLTDDEIELPVQVNGKVRGRITVAADASQEQVIEAALADEKVQEQISGKNLIKQIVVPGRMVNLVVK

SEQ ID NO: 311 - DNA, 1002 bp, Corynebacterium glutamicum
  CDS (1)..(1002): RXA00968
ctgatcgatgatctggagctgctcgattggactgagaaggtcaagtccatgcagcgtaactggattggccgttcccgcggcgctgaagttgatttcagtgcagagggcgaaaccgtcaccgtgtttaccacccgcccagatactctgttcggcgcgacctacatggttcttgcacctgagcatgagctggtcgacgtgctgctggagaaggctggttcctacgagggcgttgatgcccgttggaccaatggccaggcgagccctgcggaagctgtcgctgcataccgcgcctccatcgccgcgaagtccgacctggagcgtcaggaaaacaaggaaaagaccggcgtcttcctgggcgtttacgcgaccaacccagtcaacggcgatcagatcacagtgttcatcgctgactacgttctgaccggctacggcaccggcgccatcatggcggttcctgctcacgacgagcgcgactacgaattcgccaccgttttgggtctgcctatcaaggaagttgtcgcaggtggcaacatcgaagaggctgctttcaccgaatctggcgaagcagtcaactctgcgaacgacaacggcctggatatcaacggccttgccaaggatgaggctattgccaagaccatcgaatggttggaagaaaaggaacttggccgcggcaccatccagtacaagctgcgcgactggctgttcgctcgccagcgttactggggcgagcctttcccaatcgtctacgacgaaaacggccaagcacatgctctgccagactccatgcttccagtcgagctgccagaggtagaggactacaagcctgtctccttcgaccctgaagacgcagactccgagccttccccaccactggctaaggcccgcgaatgggttgaggtggaactcgatctcggcgatggcaagaagaagtacacccgcgacaccaacgtcatgccacagtgggcaggttcctcctggtaccagctgcgctacgtcgatcca

SEQ ID NO: 312 - protein, 334 aa, Corynebacterium glutamicum
LIDDLELLDWTEKVKSMQRNWIGRSRGAEVDFSAEGETVTVFTTRPDTLFGATYMVLAPEHELVDVLLEKAGSYEGVDARWTNGQASPAEAVAAYRASIAAKSDLERQENKEKTGVFLGVYATNPVNGDQITVFIADYVLTGYGTGAIMAVPAHDERDYEFATVLGLPIKEVVAGGNIEEAAFTESGEAVNSANDNGLDINGLAKDEAIAKTIEWLEEKELGRGTIQYKLRDWLFARQRYWGEPFPIVYDENGQAHALPDSMLPVELPEVEDYKPVSFDPEDADSEPSPPLAKAREWVEVELDLGDGKKKYTRDTNVMPQWAGSSWYQLRYVDP

SEQ ID NO: 313 - DNA, 1701 bp, Corynebacterium glutamicum
  CDS (101)..(1678): RXA01522
cacgacaacgtcggcctaccccttggaatcggcttcaaaaacatcgaaggctgatcccggtttacccagttcgcatacctttcgactaccctaggaaatcgtgactaattccaatcccacttccaagaacaattccgccgatttgcctgagcagctgcgaattcgtcgcgaaaagcgcgagcgcattctggacagtggattggacgcctacccagtcgaggttgatcgcaccatctcaatctctgacctgcgctcccaatttgttgtcattacagaagacctccaagagcgcgaagaaggcgtaacctacctcgaagtaggcgaagaaaccgacgttgaggtcgcaatcgctggccgcgtcatgttcgttcgcaacaccggcaagctctgcttcgcatccatccaagaaggaaacggcaccaccgtccaagcaatgctgtccctggcagcagtcggtgaagaatccctcaaggcctggaaagccgatgtggacatgggtgacatcgtttccgtccgcggcaaagtaatctcctccaagcgtggcgaactctccgtgatggctgactcctggcacatggcctccaagtccctgcgcccactgccagtcgcattcgcggacctcagcgaagacacccgcgtccgccaccgctacaccgacctcatcatgcgcgaacaagcccgcaccaacgcgctcacccgcatcaaggtcatgcgtgcactccgccactacctcgaagaccaagacttccttgaggtagaaacccccatgctgcaaaccctccacggtggcgcagcagcacgaccattcgaaacccactccaacgccctcgacattgacctctacctgcgcatcgcaccagagctttacctcaagcgctgcgttgtcggcggcatcgagcgcgtcttcgaagtcaaccgcaacttccgcaacgaaggcgtcgactcctcccactccccagaattcgccatgctcgaaacctacgaagcctggggaacctacgaaaccggcgcgaaactgatcaagggtctcgtccaatccgtcgcccaagaagtcttcggaaccaccctggtcaccctcgcagacggcaccgaatacgacctcggcggcgagtggaaagtcatcgagatgtacccttccctcaacgaagccctcgcacgcaaattcccaggacaaccagaagtaaccatcgactccaccgtcgaagaactccgcgaaatcgccaaggtaatcggcctctccgtccccgaaaacggcggctggggacacggcaaactcgtcgaagaaatctgggaactcctctgcgaagaccaactctacggaccaatctttgtcaaagacttcccagtagaaaccttcccactcacacgccaacaccgcaccaagccaggcgtcaccgaaaagtgggacctctacgtccgcggatttgaactagcaaccggatactccgaactcatcgacccagtcattcaacgcgaacgcttcgaaggccaagcccgcctcgccgccgacggagacgacgaagccatggtcctcgacgaagacttcctcaccgcaatggaacaaggcatgccaccaacctccggcaacggcatgggaatcgaccgcctcctcatggccctcaccggcctcggaatccgcgaaaccgtactcttcccaatggtgaaaccagaacaaaagtaggtttttgctctttgtgcttg

SEQ ID NO: 314 - protein, 526 aa, Corynebacterium glutamicum
VTNSNPTSKNNSADLPEQLRIRREKRERILDSGLDAYPVEVDRTISISDLRSQFVVITEDLQEREEGVTYLEVGEETDVEVAIAGRVMFVRNTGKLCFASIQEGNGTTVQAMLSLAAVGEESLKAWKADVDMGDIVSVRGKVISSKRGELSVMADSWHMASKSLRPLPVAFADLSEDTRVRHRYTDLIMREQARTNALTRIKVMRALRHYLEDQDFLEVETPMLQTLHGGAAARPFETHSNALDIDLYLRIAPELYLKRCVVGGIERVFEVNRNFRNEGVDSSHSPEFAMLETYEAWGTYETGAKLIKGLVQSVAQEVFGTTLVTLADGTEYDLGGEWKVIEMYPSLNEALARKFPGQPEVTIDSTVEELREIAKVIGLSVPENGGWGHGKLVEEIWELLCEDQLYGPIFVKDFPVETFPLTRQHRTKPGVTEKWDLYVRGFELATGYSELIDPVIQRERFEGQARLAADGDDEAMVLDEDFLTAMEQGMPPTSGNGMGIDRLLMALTGLGIRETVLFPMVKPEQK

SEQ ID NO: 315 - DNA, 619 bp, Corynebacterium glutamicum
  CDS (101)..(619): RXA02015
cccagagttcgttgagaccgaacacttcctgctcgacctgccagcactggctgaagcactaaccgagtggctgaagggacgcgaagactggcgtccaaacgtgttgaagttctcgctcaacctgctggacgatatccgcccacgcgcaatgtcgcgcgatatcgactggggcatcccaatcccagttgaaggatggcaagacaacaacgccaagaagctctacgtctggttcgacgctgtcgtgggctacttgtccgcatccatcgaatgggcctaccgctccggcgacccagaagcatggcgcaccttctggaatgatccagaaaccaagtcctactacttcatgggcaaagacaacatcaccttccactcccagatctggccagcggagcttctcggctacgcaggcaagggctcccgcggtggagaaatcggtgacctgggtgttctgaacctgcctactgaggttgtttcctctgagttcctgactatgtctggatccaagttctcctcatccaagggcgttgtcatctacgtgaaggacttcctcaaggagttcggcccagatgcgctgcgatacttcatcgctgcgaggcccagaaacaacgacaccgacttc

SEQ ID NO: 316 - protein, 173 aa, Corynebacterium glutamicum
VLKFSLNLLDDIRPRAMSRDIDWGIPIPVEGWQDNNAKKLYVWFDAVVGYLSASIEWAYRSGDPEAWRTFWNDPETKSYYFMGKDNITFHSQIWPAELLGYAGKGSRGGEIGDLGVLNLPTEVVSSEFLTMSGSKFSSSKGVVIYVKDFLKEFGPDALRYFIAARPRNNDTDF

SEQ ID NO: 317 - DNA, 1212 bp, Corynebacterium glutamicum
  CDS (101)..(1189): RXA01582
aatcactcaatttggccacagcagcgtcaatttgtctgtacgaatcctccaaggcactattcgccggtgagtaaaccccaattcatgcccagcgggtatgatggcggggttagttgacttaacaataaacatgagggaagggctggactacacggtgtccgaaattcagttgaccgaagccagtttgaacgaggcggccgacgccgcgatcaaggctttcgacggtgcacaaaacctagatgaactcgcagcactacgccgcgatcacttgggtgatgccgcacctattccgcaggcacgacgctcattgggaactattcctaaagatcagcgcaaggatgcgggccgctttgtcaacatggcacttggtcgcgcagaaaagcactttgctcaggtcaaggttgttttggaagaaaagcgcaacgcagaagtcctagagcttgagcgcgttgacgtcaccgttccaaccacccgcgagcaggttggtgcgctgcaccccatcacgatcctcaacgagcagatcgcagacatcttcgtgggcatgggctgggaaatcgccgagggcccagaggtggaagcagaatacttcaacttcgacgcactgaacttcctgcctgatcacccagctcgtacactgcaggacaccttccacattgcgccggaaggctcccgccaggtgctgcgtacccacacctcaccagttcaggtgcgcaccatgctcaaccgtgaagttccgatctacatcgcatgccctggccgtgtgttccgtaccgacgaactcgatgcaacacacacccctgtgttccaccagatcgaaggccttgcagttgataagggtctgactatggctcacctgcgcggcaccttggatcacctggccaaggaactcttcggcccagagaccaagactcgtatgcgctccaactacttcccattcaccgagccttccgctgaggttgatgtgtggttccctaacaagaagggtggtgcaggctggatcgagtggggtggctgtggcatggtcaacccaaacgtgcttcgtgccgtgggtgttgacccagaggagtacaccggattcgcgttcggcatgggcattgaacgtaccctgcagttccgcaacggcctgagcgatatgcgcgacatggttgagggcgatattcgcttcaccctcccattcggcattcaggcataactcatcccgcacacgactta

SEQ ID NO: 318 - protein, 363 aa, Corynebacterium glutamicum
MAGLVDLTINMREGLDYTVSEIQLTEASLNEAADAAIKAFDGAQNLDELAALRRDHLGDAAPIPQARRSLGTIPKDQRKDAGRFVNMALGRAEKHFAQVKVVLEEKRNAEVLELERVDVTVPTTREQVGALHPITILNEQIADIFVGMGWEIAEGPEVEAEYFNFDALNFLPDHPARTLQDTFHIAPEGSRQVLRTHTSPVQVRTMLNREVPIYIACPGRVFRTDELDATHTPVFHQIEGLAVDKGLTMAHLRGTLDHLAKELFGPETKTRMRSNYFPFTEPSAEVDVWFPNKKGGAGWIEWGGCGMVNPNVLRAVGVDPEEYTGFAFGMGIERTLQFRNGLSDMRDMVEGDIRFTLPFGIQA

SEQ ID NO: 319 - DNA, 2466 bp, Corynebacterium glutamicum
  CDS (101)..(2443): RXN01583
tgccatcgtctgatttggactcaggttatgtccgcgtcggctttgaaaccgaaggctactggccaatccctgaaaccaccggaccactcgttttcggcgcgtggaaaccatcgaagagctcaccgagttcaagaagcccatccgccactgccacgtcaatgttggcgacgccaacggaaccggcgaactgcagtccatcgtttgtggcgcccgcaacttcaaggaaggcgacaccgttgtcgtgtcccttcctggcgctgtgctgcctggcgatttcgcgatctctgctcgtgaaacttacggacgcatgtctgcaggcatgatctgttctgcctctgagctgggtcttgctgataagcagaactccggcatcatcaccctggatccttcttacggcgagcctggcgaagacgcacgtcaagcactgggacttgaagataccgttttcgatgtcaacgtcaccccagaccgcggttacgcactgtctgctcgtggcctgacccgcgaactggcatcggctttcagcctgaccttcaccgaccctgcgatcgagccagctgtagcaggcattgaggtcaaggtcccagcagttgaaggttccttgattaacgtggagctgcgtgaagagaccaaggcaatccgtttcggtctgcgtaaagtctctggcattgatccagcagcagaatccccattctggatgcagcgtgaactcatgctctctggtcagcgaccagtcaacgccgccaccgacgtcaccaactacgtcatgttgctgctcggccagccgatgcatgctttcgacgcagccaaggttactggcgatcttgttgtccgcaacgcaactgcaggcgagaagttcgaaaccctcgatcacgtcaagcgcaccctcaatgaggaagacgttgtgatcaccgatgacaacggcattcagtctttggctggcgttatgggtggtctcacctccgagatctctgacaccaccaccgatgtctacttcgaggccgcaacctgggacaccatcaccgttgcgcgcacctcacgtcgccacaagttgagctccgaagcttctcgacgtttcgagcgtggcgttgaccctgcgatcgtggaaatcgccctcgatatcgcagcaacccttctcgtggagatcgcaggcggcaccgtcgatgcgggtcgcaccctcgttggtgatgtccctgccatgcaacccatcaccatgaaggtcactcgaccttccgagctcgcaggcgtggattattccgcagaaactgtgatcgctcgtctggaagaggtcggatgcaccgtcgctgtttccggcgacaccttggaagtaacccctccaacctggcgcggtgacctcaccatgtccgctgacctcgtggaagaagtactccgcctcgaaggtttggaagcaattccaaccatcatcccaaccgcaccagcaggccgtggactaaccgatgcacagaagcgccgccgcgccgttggccacgctttggcttacgctggctacgccgaaatcatcccaagcccattcatggacccagaggtcttcgatgtatggggactcgcagcagacgacgagcgccgcaagaccgtttccgttctcaacccacttgaggcagaacgcaacgtcctgagcacctccttgctgccctccatgctcgatgctgtcaagcgcaacgttgcacgtggacacaacgatttctccctgttcggcctgcagcaggtcgccttcgagcacggatccggcgtttccccaatgccatctgttgcttcacgccctgaagagtctgtcgtggcagaactggtggattcactgccaaaccagccactgcatgtcgcaaccgtgggcaccggcaacatcgagttcgaaggcccatggggcaagggccgcgcctacaccttcgccgacgcgattgaatccgcgcgcgcagtcgcccgcgctgctggcgtcaccttggagctggccaacgccgacgcgcttccttggcacccaggtcgttgcgccgcattgcttatcgacggtacccccgtcggttacgctggcgaacttcacccacagatcctggaaaaggccggtctaccagcacgcacctgtgcaatggaactggatctcagcgcactgccactggtagaaaacctcccagcgccagtcctgtcctccttcccagcactgcaccaagacatcgccctagttgtggatgagaccatcccggccgaagatgtccgcgcagttgtcgaagccggcgccggcgaactgatcgaaacggtcgagcttttccacgtcttccgctccgaacagcgcggcgagaacaagaaatccctcgcgttctccctgcgtttccgcgcagccggccgcaccctcaccgatgaggaagccaacgaagcacgacttcaggcagcagagctagcaaaggagaaattcaacgctgaaatgcgtggctagtttcacataggttctatagg

SEQ ID NO: 320 - protein, 781 aa, Corynebacterium glutamicum
VETIEELTEFKKPIRHCHVNVGDANGTGELQSIVCGARNFKEGDTVVVSLPGAVLPGDFAISARETYGRMSAGMICSASELGLADKQNSGIITLDPSYGEPGEDARQALGLEDTVFDVNVTPDRGYALSARGLTRELASAFSLTFTDPAIEPAVAGIEVKVPAVEGSLINVELREETKAIRFGLRKVSGIDPAAESPFWMQRELMLSGQRPVNAATDVTNYVMLLLGQPMHAFDAAKVTGDLVVRNATAGEKFETLDHVKRTLNEEDVVITDDNGIQSLAGVMGGLTSEISDTTTDVYFEAATWDTITVARTSRRHKLSSEASRRFERGVDPAIVEIALDIAATLLVEIAGGTVDAGRTLVGDVPAMQPITMKVTRPSELAGVDYSAETVIARLEEVGCTVAVSGDTLEVTPPTWRGDLTMSADLVEEVLRLEGLEAIPTIIPTAPAGRGLTDAQKRRRAVGHALAYAGYAEIIPSPFMDPEVFDVWGLAADDERRKTVSVLNPLEAERNVLSTSLLPSMLDAVKRNVARGHNDFSLFGLQQVAFEHGSGVSPMPSVASRPEESVVAELVDSLPNQPLHVATVGTGNIEFEGPWGKGRAYTFADAIESARAVARAAGVTLELANADALPWHPGRCAALLIDGTPVGYAGELHPQILEKAGLPARTCAMELDLSALPLVENLPAPVLSSFPALHQDIALVVDETIPAEDVRAVVEAGAGELIETVELFHVFRSEQRGENKKSLAFSLRFRAAGRTLTDEEANEARLQAAELAKEKFNAEMRG

SEQ ID NO: 321 - DNA, 1816 bp, Corynebacterium glutamicum
  CDS (101)..(1816): FRXA01583
tgccatcgtctgatttggactcaggttatgtccgcgtcggctttgaaaccgaaggctactggccaatccctgaaaccaccggaccactcgttttcggcgcgtggaaaccatcgaagagctcaccgagttcaagaagcccatccgccactgccacgtcaatgttggcgacgccaacggaaccggcgaactgcagtccatcgtttgtggcgcccgcaacttcaaggaaggcgacaccgttgtcgtgtcccttcctggcgctgtgctgcctggcgatttcgcgatctctgctcgtgaaacttacggacgcatgtctgcaggcatgatctgttctgcctctgagctgggtcttgctgataagcagaactccggcatcatcaccctggatccttcttacggcgagcctggcgaagacgcacgtcaagcactgggacttgaagataccgttttcgatgtcaacgtcaccccagaccgcggttacgcactgtctgctcgtggcctgacccgcgaactggcatcggctttcagcctgaccttcaccgaccctgcgatcgagccagctgtagcaggcattgaggtcaaggtcccagcagttgaaggttccttgattaacgtggagctgcgtgaagagaccaaggcaatccgtttcggtctgcgtaaagtctctggcattgatccagcagcagaatccccattctggatgcagcgtgaactcatgctctctggtcagcgaccagtcaacgccgccaccgacgtcaccaactacgtcatgttgctgctcggccagccgatgcatgctttcgacgcagccaaggttactggcgatcttgttgtccgcaacgcaactgcaggcgagaagttcgaaaccctcgatcacgtcaagcgcaccctcaatgaggaagacgttgtgatcaccgatgacaacggcattcagtctttggctggcgttatgggtggtctcacctccgagatctctgacaccaccaccgatgtctacttcgaggccgcaacctgggacaccatcaccgttgcgcgcacctcacgtcgccacaagttgagctccgaagcttctcgacgtttcgagcgtggcgttgaccctgcgatcgtggaaatcgccctcgatatcgcagcaacccttctcgtggagatcgcaggcggcaccgtcgatgcgggtcgcaccctcgttggtgatgtccctgccatgcaacccatcaccatgaaggtcactcgaccttccgagctcgcaggcgtggattattccgcagaaactgtgatcgctcgtctggaagaggtcggatgcaccgtcgctgtttccggcgacaccttggaagtaacccctccaacctggcgcggtgacctcaccatgtccgctgacctcgtggaagaagtactccgcctcgaaggtttggaagcaattccaaccatcatcccaaccgcaccagcaggccgtggactaaccgatgcacagaagcgccgccgcgccgttggccacgctttggcttacgctggctacgccgaaatcatcccaagcccattcatggacccagaggtcttcgatgtatggggactcgcagcagacgacgagcgccgcaagaccgtttccgttctcaacccacttgaggcagaacgcaacgtcctgagcacctccttgctgccctccatgctcgatgctgtcaagcgcaacgttgcacgtggacacaacgatttctccctgttcggcctgcagcaggtcgccttcgagcacggatccggcgtttccccaatgccatctgttgcttcacgccctgaagagtctgtcgtggcagaactggtggattca

SEQ ID NO: 322 - protein, 572 aa, Corynebacterium glutamicum
VETIEELTEFKKPIRHCHVNVGDANGTGELQSIVCGARNFKEGDTVVVSLPGAVLPGDFAISARETYGRMSAGMICSASELGLADKQNSGIITLDPSYGEPGEDARQALGLEDTVFDVNVTPDRGYALSARGLTRELASAFSLTFTDPAIEPAVAGIEVKVPAVEGSLINVELREETKAIRFGLRKVSGIDPAAESPFWMQRELMLSGQRPVNAATDVTNYVMLLLGQPMHAFDAAKVTGDLVVRNATAGEKFETLDHVKRTLNEEDVVITDDNGIQSLAGVMGGLTSEISDTTTDVYFEAATWDTITVARTSRRHKLSSEASRRFERGVDPAIVEIALDIAATLLVEIAGGTVDAGRTLVGDVPAMQPITMKVTRPSELAGVDYSAETVIARLEEVGCTVAVSGDTLEVTPPTWRGDLTMSADLVEEVLRLEGLEAIPTIIPTAPAGRGLTDAQKRRRAVGHALAYAGYAEIIPSPFMDPEVFDVWGLAADDERRKTVSVLNPLEAERNVLSTSLLPSMLDAVKRNVARGHNDFSLFGLQQVAFEHGSGVSPMPSVASRPEESVVAELVDS

SEQ ID NO: 323 - DNA, 305 bp, Corynebacterium glutamicum
  CDS (1)..(282): FRXA01717
ccttcccagcaaatgcaccaagacatcgccctagttgtggatgagaccatcccggcggaagatgtccgcgcagttgtcaaagccggcgccggcgaactgatcgaaacggtcgagcttttccacgtcttccgctccgaacagcgcggcgagaacaagaaatccctcgcgttctccctgcgtttccgcgcagccggccgcaccctcaccgatgaggaagccaacgaagcacgacttcaggcagcagagctagcaaaggagaaattcaacgctgaaatgcgtggctagtttcacataggttctatagg

SEQ ID NO: 324 - protein, 94 aa, Corynebacterium glutamicum
PSQQMHQDIALVVDETIPAEDVRAVVKAGAGELIETVELFHVFRSEQRGENKKSLAFSLRFRAAGRTLTDEEANEARLQAAELAKEKFNAEMRG

SEQ ID NO: 325 - DNA, 1551 bp, Corynebacterium glutamicum
  CDS (101)..(1528): RXN01938
acacaataagcatgcatgagaggatactgtaaaagccttgcctcttaaatcgagggggcagggcagtcgaagccaagttgagagggtatatttgtcacctatgatcacacgtctttccacgctgtttttgcgcaccctgcgcgaagaccctgcagatgcagaagttccaagccacaagctgcttgtccgtgcaggatatatccgccgagttgccccaggtatctactcctggttgccactgggtttgcgcgcagtgcgcaacattgaagctgtcgtacgcgaggaaatggatgcgatcggaggacaggagctgctcttcccaacactcctgccacgtgagccttatgaaaccacacagcgttggacagaatacggcgattcgctgttccgtctgaaggaccgcaagggtgccgactacctgctcggaccaacccacgaggaaatgttcgccgccacggtgaaggatctgtacaactcctacaaggacttcccagtcaccttgtaccagatccagaccaagtaccgcgatgaggaacgcccacgcgcaggcgtgctccgcggacgcgaatttgtgatgaaggattcttactccttcgacatctcggatgctggtttggacgagtcctacgcaaagcaccgcgcagcgtatcagcgcatctttgaccgccttggcttggaatacgccatctgccaggcaacctctggtgccatgggcggatccgcttccgaggaattccttgcagtatctgaaaacggcgaagataccttcgtgcgctctacctccggcaattacgccgcaaacgtggaagctgttgttacccagccaggcgttgagcgtgacatcgaaggcctgccagaaccagtcacctacgaaactcctgtttctgaaaccatcgatgctttggttgattgggctaactccatcgacgtgcagatcgagggccgcgaggtcaccgcagatgacaccctcaagtgcattgtggtgaaggtccgcgagccaggtgccgaagaagcagaactcactggaatcttgcttccaggtgaccgcgaagtagacatgaagcgcctcgaggcatcacttgagccagcagaagttgaactcgcagtggaatccgactttgccgacaacccattcctggtcaagggctacgtcggaccagttggcctggccaagaacggcgtgaaggtccttgccgatcctcgcgttgtcaccggtacctcctggatcaccggcgccgatgaaaaggaacgccacgtcgtaggcctcgtcgccggacgcgatttcaccccagacggcttcatcgaagctgcagaaatcaaggaaggcgacccagcgccagcaggcgagggcaccctcacccttgctcgcggcatcgaaattggcatatcttccagctcggccgcaagtacaccgaagccttcgacgtccaaatcctggacgaaaacggcaagcgcgccatcccaaccatgggctctacgggctcggtgtcacccgcctgctcgccgtcctggcagaacagcgccacgatgacgctggcctcaactggtccg

SEQ ID NO: 326 - protein, 476 aa, Corynebacterium glutamicum
MITRLSTLFLRTLREDPADAEVPSHKLLVRAGYIRRVAPGIYSWLPLGLRAVRNIEAVVREEMDAIGGQELLFPTLLPREPYETTQRWTEYGDSLFRLKDRKGADYLLGPTHEEMFAATVKDLYNSYKDFPVTLYQIQTKYRDEERPRAGVLRGREFVMKDSYSFDISDAGLDESYAKHRAAYQRIFDRLGLEYAICQATSGAMGGSASEEFLAVSENGEDTFVRSTSGNYAANVEAVVTQPGVERDIEGLPEPVTYETPVSETIDALVDWANSIDVQIEGREVTADDTLKCIVVKVREPGAEEAELTGILLPGDREVDMKRLEASLEPAEVELAVESDFADNPFLVKGYVGPVGLAKNGVKVLADPRVVTGTSWITGADEKERHVVGLVAGRDFTPDGFIEAAEIKEGDPAPAGEGTLTLARGIEIGISSSSAASTPKPSTSKSWTKTASAPSQPWALRARCHPPARRPGRTAPR

SEQ ID NO: 327 - DNA, 1031 bp, Corynebacterium glutamicum
  CDS (94)..(1008): FRXA01938
ccgcgatgaggaacgcccacgcgcaggcgtgctccgcgggacgcgaatttgtgatgaaggattcttactccttcgacatctcgggatgctggtttggacgagtcctacgcaaagcaccgcgcagcgtatcagcgcatctttgaccgccttggcttggaatacgccatctgccaggcaacctctggtgccatgggcggatccgcttccgaggaattccttgcagtatctgaaaacggcgaagataccttcgtgcgctctacctccggcaattacgccgcaaacgtggaagctgttgttacccagccaggcgttgagcgtgacatcgaaggcctgccagaaccagtcacctacgaaactcctgtttctgaaaccatcgatgctttggttgattgggctaactccatcgacgtgcagatcgagggccgcgaggtcaccgcagatgacaccctcaagtgcattgtggtgaaggtccgcgagccaggtgccgaagaagcagaactcactggaatcttgcttccaggtgaccgcgaagtagacatgaagcgcctcgaggcatcacttgagccagcagaagttgaactcgcagtggaatccgactttgccgacaacccattcctggtcaagggctacgtcggaccagttggcctggccaagaacggcgtgaaggtccttgccgatcctcgcgttgtcaccggtacctcctggatcaccggcgccgatgaaaaggaacgccacgtcgtaggcctcgtcgccggacgcgatttcaccccagacggcttcatcgaagctgcagaaatcaaggaaggcgacccagcgccagcaggcgagggcaccctcacccttgctcgcggcatcgaaattggcatatcttccagctcggccgcaagtacaccgaagccttcgacgtccaaatcctggacgaaaacggcaagcgcgccatcccaaccatgggctctacgggctcggtgtcacccgcctgctcgccgtcctggcagaacagcgccacgatgacgctggcctcaactggtccg

SEQ ID NO: 328 - protein, 305 aa, Corynebacterium glutamicum
LDESYAKHRAAYQRIFDRLGLEYAICQATSGAMGGSASEEFLAVSENGEDTFVRSTSGNYAANVEAVVTQPGVERDIEGLPEPVTYETPVSETIDALVDWANSIDVQIEGREVTADDTLKCIVVKVREPGAEEAELTGILLPGDREVDMKRLEASLEPAEVELAVESDFADNPFLVKGYVGPVGLAKNGVKVLADPRVVTGTSWITGADEKERHVVGLVAGRDFTPDGFIEAAEIKEGDPAPAGEGTLTLARGIEIGISSSSAASTPKPSTSKSWTKTASAPSQPWALRARCHPPARRPGRTAPR

SEQ ID NO: 329 - DNA, 1389 bp, Corynebacterium glutamicum
  CDS (101)..(1366): RXA02692
gtgactgaagcgggacaggagcgcctagtaaaaagcaaggctggaaaacagataagccctaagtgcccacatgtctaccgatcacggtagattgttctttatgatcgatctgaaattcctccgtgataacccggacgttgttcgtgcctcccagatcactcgcggcgaagaccccgcgcttgtggacgaactgattagtgctgatgaatctcgtcgcgaagcaatcaaggctgccgacgatttgcgcgctgagcagaaggcttttggaaagaagatcggacaggcctctccggaggaccgccctgcacttctggagggttccaacgaactcaaagccaaggtgaaggatgctgaggctgcacaggaagctgctgaggcgaaagtcaatgagctgcagatgaagctctccaacgtggtttccggcgcgcctgctggtggcgaagatgatttcgtcgtcctggagaccatcggcgagcctcgcacttttgatttcgagccaaaggatcacctggagctcggtgaatccctcggacttatcgatatgaagcgcggcaccaaggtttccggtgcacgtttctactacctcaccggtgacggcgcaatgctgcagttgggcatgctcatgttggctgctcagaaggcgcgcgaagctggatttagcatgatgatccctccagttttggtgcgccctgaaatcatggcgggcactggattcttgggtgatcactccgaggagatctactacctcgaacgcgatgacatgtacttggtgggtacctctgaggtggctcttgcgggttaccacaaggacgaaatcattgatctcaacgaaggcccagtgaagtacgccggttggagctcctgcttccgccgtgaggctggttcctacggcaaggacacccgaggcattttgcgtgtgcaccagttcgacaaggttgagatgtttgtctactgcaagcctgaagatgctgaagatgtacaccagcagctgctcggcatggaaaaggaaatgctcgcagccatcgaggttccttaccgcgtcatcgacgttgccggtggagacttgggtgcatctgctgcccgcaagttcgacaccgaggcatgggtgccaacccaggacacctaccgtgaactcacctcgacctctaactgcaccactttccaggctcgtcgcctgcagactcgttaccgcgatgaaaacggcaagccacagatcgccgcaaccctgaacggtacgttggctaccactcgttggcttgtcgcgatcctggagaacaaccagcaggccgatggctctgttgttgttcctgaggcgcttcgtccattcgtgggcaaagacgtgctcaagccagtgaaacaagccggttaattaagcggaaagctcgtggt

SEQ ID NO: 330 - protein, 422 aa, Corynebacterium glutamicum
MIDLKFLRDNPDVVRASQITRGEDPALVDELISADESRREAIKAADDLRAEQKAFGKKIGQASPEDRPALLEGSNELKAKVKDAEAAQEAAEAKVNELQMKLSNVVSGAPAGGEDDFVVLETIGEPRTFDFEPKDHLELGESLGLIDMKRGTKVSGARFYYLTGDGAMLQLGMLMLAAQKAREAGFSMMIPPVLVRPEIMAGTGFLGDHSEEIYYLERDDMYLVGTSEVALAGYHKDEIIDLNEGPVKYAGWSSCFRREAGSYGKDTRGILRVHQFDKVEMFVYCKPEDAEDVHQQLLGMEKEMLAAIEVPYRVIDVAGGDLGASAARKFDTEAWVPTQDTYRELTSTSNCTTFQARRLQTRYRDENGKPQIAATLNGTLATTRWLVAILENNQQADGSVVVPEALRPFVGKDVLKPVKQAG

SEQ ID NO: 331 - DNA, 1383 bp, Corynebacterium glutamicum
  CDS (101)..(1360): RXA02167
ggcctatcgcattgacgacggaattccggtgcttctcatcgacgaagccaccgagtggacccccaacaactagaagtacatcaaggacatttttaacaccatgaacatcattgacgaactctcctggcgcggactcatcaaccagtccaccgaccttgaggcccttcgcgaggaagcttcaacccccatcaccttgtactgcggattcgacccaaccggtccatccctccacgcaggacacctcgttccactgctcatgctgcgccgtttccagcaagcaggacacaacccaatcgtgctcgcaggtggcgcaaccggcatgatcggcgacccccgcgatgtcggcgagcgcaccatgaactccgcagacaccgtctctgattgggcagaacgcatctccggtcagctcagccgcttcgttgatttcgacggcgagcacgcagcccgtctggtcaacaacgccgagtggaccaacgaaatgtccgtagtgaccttcctccgtgatgtaggaaagcacttctccctcaacaccatgctcgcccgcgacaccgtcaagcgtcgcctcgagtccgacggcatttcctacaccgagttctcctacatgctgctacaggccaacgactacgttgaactgaacaagcgcttcggctgcaccctgcaggtaggtggcggtgaccagtggggcaacatcgtttctggcgttgacctcaaccgtcgcgtcaacggcacctctgtccacgcagtgaccgtacctttggttaccgattccgacggcaagaagttcggcaagtccaccggcggcggaagcctctggttggatccggaaatgaccagcccatacgcttggtaccagtacttcatcaacgcatccgacgctgacgtgatccgttacctccgctggttcaccttcctcacccaggaagaacttgctgagttggaagttgaagttgcagagcgcccattcaagcgcgaagcacagcgtcgtcttgcacgcgaaatgaccaacttggttcacggaaccgaagcaaccgaagcagtcgagcttgctgctcaagcactgttcggccgcgcagaactccgcgacctagacgaaaaaactctcgctgcatccgtttctgaaactgcagttgcagaaatcaaggcaggggagccacgcaccatcatagatctgctcgtggccagcggacttgctgattccaagggcgcagcaaagcgtgcagtcaaggaaggcggtgcgtacgtaaacaacgaacgcatcgaatcggatgattgggagcctttcgctgaagatcttcttcacggttcatggctagtactgcgccgtggcaagaagaacttcgcaggagttcagatcctcggctaataatcgctgaaatgattgcg

SEQ ID NO: 332 - protein, 420 aa, Corynebacterium glutamicum
MNIIDELSWRGLINQSTDLEALREEASTPITLYCGFDPTGPSLHAGHLVPLLMLRRFQQAGHNPIVLAGGATGMIGDPRDVGERTMNSADTVSDWAERISGQLSRFVDFDGEHAARLVNNAEWTNEMSVVTFLRDVGKHFSLNTMLARDTVKRRLESDGISYTEFSYMLLQANDYVELNKRFGCTLQVGGGDQWGNIVSGVDLNRRVNGTSVHAVTVPLVTDSDGKKFGKSTGGGSLWLDPEMTSPYAWYQYFINASDADVIRYLRWFTFLTQEELAELEVEVAERPFKREAQRRLAREMTNLVHGTEATEAVELAAQALFGRAELRDLDEKTLAASVSETAVAEIKAGEPRTIIDLLVASGLADSKGAAKRAVKEGGAYVNNERIESDDWEPFAEDLLHGSWLVLRRGKKNFAGVQILG

SEQ ID NO: 333 - DNA, 1994 bp, Corynebacterium glutamicum
  CDS (1)..(1971): RXA02509
gatctgcccaacaagggtccagaggctatcgtttgtgcaaaagacgctgaaggccaactaaaggatctttcacacgtcccagaaaccactgctacgttcaccgctgtacctgcaaatactgatgacggccgcgcagtaatccgccactcgtgcgctcacgtgctggcacaggctgtccaggcagaattcccaggaaccaagttgggcatcggcccagccattgaaaatggtttctactacgacttcgatgcggctgagcctttcactccggaagatctcaagaccattgaaaagcggatgaagaagatcatcaagaccggccagaagtttgagcgccgcgtctatgaatccgctgaagctgcagcggaagagttgaagaacgagccttacaagctggaacttatccaggacaagggcaacgttgatcccaactctgatgaagccaccgaagtgggcgcaggcgaactgaccgcgtatgacaacgtcaaccctcgcaccagtgaggtggagtggtctgatctttgccgtggaccacacatcccaaccacccgctacattccagcattcgcattgacccgatcatccgctgcttattggcgtggcgatcaggataatgctggcctgcagcgcatctacggtaccgcgtgggaggataaggaatccctcgatgcttaccagaccatgctcgctgaggcagaaaagcgcgatcaccgccgtctaggcactgaacttgatttgttctccttcccagatgatctgggctctggtctgccagtattccatcccaacggtggcatcgtgcgcaatgagatggaagatcactcccgtcgccgccacatcgcagcgggctactcctttgtgaacaccccgcacatcaccaagcaggatctctttgagcgttccggtcaccttggtttctacaaggatggcatgttccctccaatgcaggtggatgcggagttcgacgaagacggcaatgtgaccaagccgggccaagagtactacctcaagcccatgaactgcccaatgcacaacctcatcttcgattctcgtggacgttcttaccgtgagcttccactgcgtctttttgagttcggcaacgtctaccgctacgaaaagtccggtgtgatccacggcctgacccgtgcccgtggcttcacccaggacgatgctcacatctactgcaccgaggatcagctggaagcagagctcacctctgtgctggacttcatcctgtcgctgctgcgcgattacggtttggatgatttctacctggagctctccacccgcgatcctaagaagtcagtcggttctgatgagatctgggagcgttccactgaaatcttgaaccgtgtggccaccaattctggcctggaacttgttccagacccagaaggtgccgcattctacggccctaagatttctgttcaggcacgcgacgcgattggccgtacctggcagatgtccaccgtgcagctggacttcaacatgcctgagcgcttcaacttggaatacacctcatctgatggttccaagcagcagcccatcatgatccaccgcgcactgtttggttccatcgagcgcttctttggcgtgttgttggagcactacgctggtgctttcccagcatggctggcacctcaccaggtcatgggtattccagttgctgatgattgcattccacacctggagacaatcaccgcacagctgcgtgaaaagggtatccgcgcagacgtggacacctccgatgatcgcatgcagaagaagatccgcaaccacaccaccggcaaggttccattcatgctgcttgccggtgcccgcgatgtggaagcaaacgcagtgagcttccgtttcttggacggcacccaggtcaacggcgtgcccgtcgatgaggcaatcgctgtgatttcttcctggattggtgaccgcatcaatgatcagccgagcgaggactccattgcagctcgcaggtagccctgagatggactcatctg

SEQ ID NO: 334 - protein, 657 aa, Corynebacterium glutamicum
DLPNKGPEAIVCAKDAEGQLKDLSHVPETTATFTAVPANTDDGRAVIRHSCAHVLAQAVQAEFPGTKLGIGPAIENGFYYDFDAAEPFTPEDLKTIEKRMKKIIKTGQKFERRVYESAEAAAEELKNEPYKLELIQDKGNVDPNSDEATEVGAGELTAYDNVNPRTSEVEWSDLCRGPHIPTTRYIPAFALTRSSAAYWRGDQDNAGLQRIYGTAWEDKESLDAYQTMLAEAEKRDHRRLGTELDLFSFPDDLGSGLPVFHPNGGIVRNEMEDHSRRRHIAAGYSFVNTPHITKQDLFERSGHLGFYKDGMFPPMQVDAEFDEDGNVTKPGQEYYLKPMNCPMHNLIFDSRGRSYRELPLRLFEFGNVYRYEKSGVIHGLTRARGFTQDDAHIYCTEDQLEAELTSVLDFILSLLRDYGLDDFYLELSTRDPKKSVGSDEIWERSTEILNRVATNSGLELVPDPEGAAFYGPKISVQARDAIGRTWQMSTVQLDFNMPERFNLEYTSSDGSKQQPIMIHRALFGSIERFFGVLLEHYAGAFPAWLAPHQVMGIPVADDCIPHLETITAQLREKGIRADVDTSDDRMQKKIRNHTTGKVPFMLLAGARDVEANAVSFRFLDGTQVNGVPVDEAIAVISSWIGDRINDQPSEDSIAARR

SEQ ID NO: 335 - DNA, 461 bp, Corynebacterium glutamicum
  CDS (1)..(438): RXN03169
gatctgcagaaccccaccgccaagatgtccaagtccggcgacaacccgaagggcatcatcaacctgcttgatgatccaaaggtgtccaccaagcgcatcaagtccgcagtcaccgacaacgacggcgtcatcgcctacgatccagaaaacaagcctggcgtgtccaacttgctggtcatccagtctgcgctgacgggtacctccatcgattcgcttgtcgacggctaccagggcgctggctacggtgcgttgaagggtgacaccgccgacgcgcttgaggctttcaccactcctttgaaggcaaagtacgacgagtacatgaatgaccgcggcgagctcgaacgagtcttggctatcggtgctgagcgcgccaccgaagttgccaacgaaaccttggctgatgtgtacgacaagattggtttcttggcgtctcgtcgctaacaactagaccctcgattatt

SEQ ID NO: 336 - protein, 146 aa, Corynebacterium glutamicum
DLQNPTAKMSKSGDNPKGIINLLDDPKVSTKRIKSAVTDNDGVIAYDPENKPGVSNLLVIQSALTGTSIDSLVDGYQGAGYGALKGDTADALEAFTTPLKAKYDEYMNDRGELERVLAIGAERATEVANETLADVYDKIGFLASRR

SEQ ID NO: 337 - DNA, 461 bp, Corynebacterium glutamicum; identical to SEQ ID NO: 335
  CDS (1)..(438): FRXA02860

SEQ ID NO: 338 - protein, 146 aa, Corynebacterium glutamicum; identical to SEQ ID NO: 336

SEQ ID NO: 339 - DNA, 580 bp, Corynebacterium glutamicum
  CDS (101)..(580): RXN03078
tgaacaaaaccctaaactttcggccgatagcaaccccgctcgactggtaaatgttgcctcaccggaaaaggtctgtccaaggtgactacactgatacagcatgacgacgcaggataaagatctcaccgcacaaaccgcttccagagtcctttctggaattcagcccaccgccgattcctatcacctgggcaattacttgggagcagtcaagcagtggattgacctgcaagattcctacgatgccttctacttcattccagatctccacgcgattaccgtcgatcaggaaccagaagagctgcgcaaccgcaccatttccggcgccgcacagctgctggccctgggcattgatccagaacgctccaccttgtttgtgcagtcgcatgttcccgcacatgcagaactgtcatgggttctgacctgcctgaccggtttcggcgaggcatcccgcatgacccagttcaaggacaagtcctccaagcgtggcgccgaccgtacctcagctggtctgttcacctacccgatgctgatggcagcagatattttgctgtaccgcccacatcttgtcccagtcggtgaa

SEQ ID NO: 340 - protein, 160 aa, Corynebacterium glutamicum
MTTQDKDLTAQTASRVLSGIQPTADSYHLGNYLGAVKQWIDLQDSYDAFYFIPDLHAITVDQEPEELRNRTISGAAQLLALGIDPERSTLFVQSHVPAHAELSWVLTCLTGFGEASRMTQFKDKSSKRGADRTSAGLFTYPMLMAADILLYRPHLVPVGE

SEQ ID NO: 341 - DNA, 580 bp, Corynebacterium glutamicum; identical to SEQ ID NO: 339
  CDS (101)..(580): FRXA02866

SEQ ID NO: 342 - protein, 160 aa, Corynebacterium glutamicum; identical to SEQ ID NO: 340

SEQ ID NO: 343 - DNA, 2832 bp, Corynebacterium glutamicum
  CDS (101)..(2809): RXN00985
tccgtaaactggaaggccatacctgtttattgggcaattacaaagcaataaactcattaacctaaatccggatacttgataaacaagtacaggggttaagatggtctgcgtgactgaccagaataatgagaccaccagccagaaccgcgcagacaagctgcccaagtcctgggatcctaaagctgtagaagctgatttgtaccagggctgggtagacgccggttatttcactgccgatcctgctagcgacaagccaggattctccattgttctgcctccaccaaacgtgaccggccagctgcacatgggacacgcacttgaccacaccctgatggatgctcttgcacgtcgcaagcgcatgcagggctttgaggttttgtggctgccaggtatggaccacgcgggtatcgcgacccagaccaaggtcgaggagatgctgaaggaaactgaaggcaaaactcgctacgactatgaccgcgaagagttcatcgccaaggtctgggagtggaagcaagaatatggtggaaagatcggcgagcagatgcgcgccatcggcgattccgtggactggtcccgcgagcgtttcaccttggatgacggcttgtcccgcgccgtccaaacgattttcaagaagcttttcgacgccggcctcatctatcaggccaaccgcctcgtcaactggtcgcccgtactagaaaccgcggtttctgacatcgaagttatctacaaggatgtcgaaggcgaactggtatccattcgctatggttccctcaacgacgatgaaccacatgtcattgttgccaccacccgtgtggaaaccatgctcggcgacgtcgctgttgccgtgcacccagacgatgagcgctacaaggatttggtcggacagaccctgcctcacccattccgcgatgacctgagcctgaaggttgttgctgatgattacgtcgacccagagttcggctccggtgccgtcaagatcaccccagcacacgaccctaatgactacgctcttggcctgcgccacaacctggacatgcctaccatcatggacaagaccggacgcattgccgataccggaacccagtttgatggcctgacccgcgaagaagcacgcatcaaggtccgcgaagaactcgcagcccagggtcgcattgtcaaggaaattcgcccatacgtccactccgtcggacactccgagcgttccggcgaagctattgagcctcgtctgtctctgcagtggttcgtcaaggtcgaagagctggccaagatgtccggcgatgccgtgcgcgaaggcgacaccaccatccacccgaagtccctggagcctcgctactttgactgggttgacaacatgcatgactggaccatttcccgtcagctgtggtggggacaccgcatcccaatttggtatggaccaaacgatgaaatcatctgcgttgggcctgatgagcaggcacctgagggctacgtccaagacccagatgttctagatacctggttctcttctgcgctgtggccattttctacaatgggttggccagaaaagacccctgagctggagaagttctacccaacctccgtgctggtcaccgcctacgacatcctgttcttctgggttgcccgcatgatgatgttcggcacctttgcagccaaggaaaccccagaacttctgggcgaaggcaaggatggacgcccacaggttccattcaccgacctcttcctgcacggcctggttcgcgatgagcacggccgcaagatgtccaagtctttgggcaacggcatcgatccgatggattgggtggagaactacggcgcggatgcgttgcgcttcacccttgcccgtggcgctaacccaggcgtcgacctgcctgtcggtgaagactctgcacagagctcccgtaactttgccaccaagctgttcaacgcaaccaagtttgcgctgatgaacggtgcagtgtccgaaggcctgccagcacgtgaagaactcaccgacgctgaccgctggatcgtggacctccttgagcaggttcgcctcgacgttgatgcttacctggacaactaccagttcgcgaaggccaacgaggagctctaccactttgcgtggaacgagttctgtgactggtacctggaaatcgcgaaggttcagatcccacgcgaaggcacctccgctcagggtgaaaacacccaaaaggtgcttggccatgtcttggatgcactgcttcgtctgctgcacccagctatgcctttcgtcaccgaagttctgtggcaggcacttactgatcgcacctccatcgtggtggcctcctggccaaccgcagctgacaccaacggcggagtcgccgtggacgctgatgcagctaggcgcattggcgacgtcgagaagcttgttactgaggttcgtcgtttccgcgctgaccagggtgtgaagccttcccagaaggttccagcacgccttgatttcgtggcatgtgacctgcaggatctggaagattccgtgcgctccctggttcgcatcgagcaaccagaagatgatttcgcagcttctgccagcctggagatccgcctgagccaagcaaccatcacggtggagcttgacacctctggaactgttgacgttgcagcagagcgcaagcgcctggaaaaggacctggctaacgcacagaaggaattggaaaccaccgcaaagaagctgggtaatgaggctttcctgtccaaggcacctgatgcagtggtagacaagatccgtggccgtgcgcagattgcccaagaagaagttgagcgcattaacaagcgtctggaggaattggcctagtggctaacaacgacggaatc

SEQ ID NO: 344 - protein, 903 aa, Corynebacterium glutamicum
MVCVTDQNNETTSQNRADKLPKSWDPKAVEADLYQGWVDAGYFTADPASDKPGFSIVLPPPNVTGQLHMGHALDHTLMDALARRKRMQGFEVLWLPGMDHAGIATQTKVEEMLKETEGKTRYDYDREEFIAKVWEWKQEYGGKIGEQMRAIGDSVDWSRERFTLDDGLSRAVQTIFKKLFDAGLIYQANRLVNWSPVLETAVSDIEVIYKDVEGELVSIRYGSLNDDEPHVIVATTRVETMLGDVAVAVHPDDERYKDLVGQTLPHPFRDDLSLKVVADDYVDPEFGSGAVKITPAHDPNDYALGLRHNLDMPTIMDKTGRIADTGTQFDGLTREEARIKVREELAAQGRIVKEIRPYVHSVGHSERSGEAIEPRLSLQWFVKVEELAKMSGDAVREGDTTIHPKSLEPRYFDWVDNMHDWTISRQLWWGHRIPIWYGPNDEIICVGPDEQAPEGYVQDPDVLDTWFSSALWPFSTMGWPEKTPELEKFYPTSVLVTAYDILFFWVARMMMFGTFAAKETPELLGEGKDGRPQVPFTDLFLHGLVRDEHGRKMSKSLGNGIDPMDWVENYGADALRFTLARGANPGVDLPVGEDSAQSSRNFATKLFNATKFALMNGAVSEGLPAREELTDADRWIVDLLEQVRLDVDAYLDNYQFAKANEELYHFAWNEFCDWYLEIAKVQIPREGTSAQGENTQKVLGHVLDALLRLLHPAMPFVTEVLWQALTDRTSIVVASWPTAADTNGGVAVDADAARRIGDVEKLVTEVRRFRADQGVKPSQKVPARLDFVACDLQDLEDSVRSLVRIEQPEDDFAASASLEIRLSQATITVELDTSGTVDVAAERKRLEKDLANAQKELETTAKKLGNEAFLSKAPDAVVDKIRGRAQIAQEEVERINKRLEELA

SEQ ID NO: 345 - DNA, 590 bp, Corynebacterium glutamicum
  CDS (96)..(590): FRXA00985
tctcgctgcgttaggggacgaactggaaccttgaaatcgggaaggttcagatcccacgcgaaggcacctccgctcagggtgaaaacacccaaaaggtgcttggccatgtcttggatgcactgcttcgtctgctgcacccagctatgcctttcgtcaccgaagttctgtggcaggcacttactgatcgcacctccatcgtggtggcctcctggccaaccgcagctgacaccaacggcggagtcgccgtggacgctgatgcagctaggcgcattggcgacgtcgagaagcttgttactgaggttcgtcgtttccgcgctgaccagggtgtgaagccttcccagaaggttccagcacgccttgatttcgtggcatgtgacctgcaggatctggaagattccgtgcgctccctggttcgcatcgagcaaccagaagatgatttcgcagcttctgccagcctggagatccgcctgagccaagcaaccatcacggtggagcttgacacctctggaactgttgacgttgcagcagagcgcaagcgcctggaaaaggacctggctaacgcacagaaggaattggaaaccaccgcaaag

SEQ ID NO: 346 - protein, 165 aa, Corynebacterium glutamicum
VLGHVLDALLRLLHPAMPFVTEVLWQALTDRTSIVVASWPTAADTNGGVAVDADAARRIGDVEKLVTEVRRFRADQGVKPSQKVPARLDFVACDLQDLEDSVRSLVRIEQPEDDFAASASLEIRLSQATITVELDTSGTVDVAAERKRLEKDLANAQKELETTAK

SEQ ID NO: 347 - DNA, 2149 bp, Corynebacterium glutamicum
  CDS (101)..(2149): FRXA01347
tccgtaaactggaaggccatacctgtttattgggcaattacaaagcaataaactcattaacctaaatccggatacttgataaacaagtacaggggttaagatggtctgcgtgactgaccagaataatgagaccaccagccagaaccgcgcagacaagctgcccaagtcctgggatcctaaagctgtagaagctgatttgtaccagggctgggtagacgccggttatttcactgccgatcctgctagcgacaagccaggattctccattgttctgcctccaccaaacgtgaccggccagctgcacatgggacacgcacttgaccacaccctgatggatgctcttgcacgtcgcaagcgcatgcagggctttgaggttttgtggctgccaggtatggaccacgcgggtatcgcgacccagaccaaggtcgaggagatgctgaaggaaactgaaggcaaaactcgctacgactatgaccgcgaagagttcatcgccaaggtctgggagtggaagcaagaatatggtggaaagatcggcgagcagatgcgcgccatcggcgattccgtggactggtcccgcgagcgtttcaccttggatgacggcttgtcccgcgccgtccaaacgattttcaagaagcttttcgacgccggcctcatctatcaggccaaccgcctcgtcaactggtcgcccgtactagaaaccgcggtttctgacatcgaagttatctacaaggatgtcgaaggcgaactggtatccattcgctatggttccctcaacgacgatgaaccacatgtcattgttgccaccacccgtgtggaaaccatgctcggcgacgtcgctgttgccgtgcacccagacgatgagcgctacaaggatttggtcggacagaccctgcctcacccattccgcgatgacctgagcctgaaggttgttgctgatgattacgtcgacccagagttcggctccggtgccgtcaagatcaccccagcacacgaccctaatgactacgctcttggcctgcgccacaacctggacatgcctaccatcatggacaagaccggacgcattgccgataccggaacccagtttgatggcctgacccgcgaagaagcacgcatcaaggtccgcgaagaactcgcagcccagggtcgcattgtcaaggaaattcgcccatacgtccactccgtcggacactccgagcgttccggcgaagctattgagcctcgtctgtctctgcagtggttcgtcaaggtcgaagagctggccaagatgtccggcgatgccgtgcgcgaaggcgacaccaccatccacccgaagtccctggagcctcgctactttgactgggttgacaacatgcatgactggaccatttcccgtcagctgtggtggggacaccgcatcccaatttggtatggaccaaacgatgaaatcatctgcgttgggcctgatgagcaggcacctgagggctacgtccaagacccagatgttctagatacctggttctcttctgcgctgtggccattttctacaatgggttggccagaaaagacccctgagctggagaagttctacccaacctccgtgctggtcaccgcctacgacatcctgttcttctgggttgcccgcatgatgatgttcggcacctttgcagccaaggaaaccccagaacttctgggcgaaggcaaggatggacgcccacaggttccattcaccgacctcttcctgcacggcctggttcgcgatgagcacggccgcaagatgtccaagtctttgggcaacggcatcgatccgatggattgggtggagaactacggcgcggatgcgttgcgcttcacccttgcccgtggcgctaacccaggcgtcgacctgcctgtcggtgaagactctgcacagagctcccgtaactttgccaccaagctgttcaacgcaaccaagtttgcgctgatgaacggtgcagtgtccgaaggcctgccagcacgtgaagaactcaccgacgctgaccgctggatcgtggacctccttgagcaggttcgcctcgacgttgatgcttacctggacaactaccagttcgcgaaggccaacgaggagctctaccactttgcgtggaacgagttctgtgactggtacctggaaatcgcgaaggttcagatc

SEQ ID NO: 348 - protein, 683 aa, Corynebacterium glutamicum
MVCVTDQNNETTSQNRADKLPKSWDPKAVEADLYQGWVDAGYFTADPASDKPGFSIVLPPPNVTGQLHMGHALDHTLMDALARRKRMQGFEVLWLPGMDHAGIATQTKVEEMLKETEGKTRYDYDREEFIAKVWEWKQEYGGKIGEQMRAIGDSVDWSRERFTLDDGLSRAVQTIFKKLFDAGLIYQANRLVNWSPVLETAVSDIEVIYKDVEGELVSIRYGSLNDDEPHVIVATTRVETMLGDVAVAVHPDDERYKDLVGQTLPHPFRDDLSLKVVADDYVDPEFGSGAVKITPAHDPNDYALGLRHNLDMPTIMDKTGRIADTGTQFDGLTREEARIKVREELAAQGRIVKEIRPYVHSVGHSERSGEAIEPRLSLQWFVKVEELAKMSGDAVREGDTTIHPKSLEPRYFDWVDNMHDWTISRQLWWGHRIPIWYGPNDEIICVGPDEQAPEGYVQDPDVLDTWFSSALWPFSTMGWPEKTPELEKFYPTSVLVTAYDILFFWVARMMMFGTFAAKETPELLGEGKDGRPQVPFTDLFLHGLVRDEHGRKMSKSLGNGIDPMDWVENYGADALRFTLARGANPGVDLPVGEDSAQSSRNFATKLFNATKFALMNGAVSEGLPAREELTDADRWIVDLLEQVRLDVDAYLDNYQFAKANEELYHFAWNEFCDWYLEIAKVQI

SEQ ID NO: 349 - DNA, 1416 bp, Corynebacterium glutamicum
  CDS (101)..(1393): RXN00454
cgtcgatgttcctgatgggcaaggccacgtggtggatgcctaagtggctggatcgaattctgccaagtttggacattgaaggcaccgcactggagaaggaatgggaggagaagcaggctgcacgttagacttggcacctatgtcagatctttcattcaccctcaacaacaagcttgccgatgacgcccccggcaagcatggtcgtacaggtgtaatccacacacctcacggtgatattgccacccctgctttcattcctgtggctaccaaagccacggtgaaaacccttacccctgagcagattcgggagaccggcgcacaggctattttgtccaacgcctaccacctgtatctgcagcctggccccgacatcgtggacgaggctggcggtgtgtctgcctttgagaactggcacggccccacctacaccgactccggcggattccaggtcatgagcctgggctccggctttaaaaaggtgctggccatggacaccaccaacttgacgcgcaacgatatcaaggcggctaaaaaagagcgcatggcgcttgtcgacgaagacggcgtggatttcaaatctgttatcgatggctcaaagcaccgattcaccccagaagtctccatgcagattcagcaccaattgggcgcagacatcatctttgcttttgatgaactgaccaccttggttgatacctatgactaccaggtggaatctgtggaacgtacccgcaggtgggcacagcgctgcctcctggagcatgaacgtttgactcaggaacgtgtggataaaccactgcaatccctatggggagtggtgcagggggcgcagttcgaggatttgcgtcgacaagcagtaaaaggcctgttggacctggatcgccaggccgccgacgaaggccgtcgcggcttcggcggtttcggcatcggtggcgccctagagaaggaaaacctgggcaccatcgtgggctgggtgtgcgatgagctgcccgaggacaagccacgtcacctgctgggcatttccgagccggacgatctgttcgtggctgtcgaagccggtgcggacacctttgactgcgtggcgccgactcgtttgggtcgacgcggcggtgtctacacgcttgatggacgcatgaatttgaccggtgcgcgtttcaagcgtgacttcaagggaatcgatgaggaagtcggcggatacgccagcgagaactactcccgcgcgtacattcatcacctgctcaaagcgaaggaatttttggccggcacgctgtgcaccatgcacaatctgcacttcatgatcaccttggtggataagattcgtgccagcatcgatgatggcacgtactacgaattcaaggaagaattcttaggccggtactacgcgtcgaaggtttcataaccttcgcggcgtttcaccca

SEQ ID NO: 350 - protein, 431 aa, Corynebacterium glutamicum
MGGEAGCTLDLAPMSDLSFTLNNKLADDAPGKHGRTGVIHTPHGDIATPAFIPVATKATVKTLTPEQIRETGAQAILSNAYHLYLQPGPDIVDEAGGVSAFENWHGPTYTDSGGFQVMSLGSGFKKVLAMDTTNLTRNDIKAAKKERMALVDEDGVDFKSVIDGSKHRFTPEVSMQIQHQLGADIIFAFDELTTLVDTYDYQVESVERTRRWAQRCLLEHERLTQERVDKPLQSLWGVVQGAQFEDLRRQAVKGLLDLDRQAADEGRRGFGGFGIGGALEKENLGTIVGWVCDELPEDKPRHLLGISEPDDLFVAVEAGADTFDCVAPTRLGRRGGVYTLDGRMNLTGARFKRDFKGIDEEVGGYASENYSRAYIHHLLKAKEFLAGTLCTMHNLHFMITLVDKIRASIDDGTYYEFKEEFLGRYYASKVS

SEQ ID NO: 351 - DNA, 864 bp, Corynebacterium glutamicum
  CDS (1)..(864): FRXA00454
ggtgatattgccacccctgctttcattcctgtggctaccaaagccacggtgaaaacccttacccctgagcagattcgggagaccggcgcacaggctattttgtccaacgcctaccacctgtatctgcagcctggccccgacatcgtggacgaggctggcggtgtgtctgcctttgagaactggcacggccccacctacaccgactccggcggattccaggtcatgagcctgggctccggctttaaaaaggtgctggccatggacaccaccaacttgacgcgcaacgatatcaaggcggctaaaaaagagcgcatggcgcttgtcgacgaagacggcgtggatttcaaatctgttatcgatggctcaaagcaccgattcaccccagaagtctccatgcagattcagcaccaattgggcgcagacatcatctttgcttttgatgaactgaccaccttggttgatacctatgactaccaggtggaatctgtggaacgtacccgcaggtgggcacagcgctgcctcctggagcatgaacgtttgactcaggaacgtgtggataaaccactgcaatccctatggggagtggtgcagggggcgcagttcgaggatttgcgtcgacaagcagtaaaaggcctgttggacctggatcgccaggccgccgacgaaggccgtcgcggcttcggcggtttcggcatcggtggcgccctagagaaggaaaacctgggcaccatcgtgggctgggtgtgcgatgagctgcccgaggacaagccacgtcacctgctgggcatttccgagccggacgatctgttcgtggctgtcgaagccggtgcggacaccttttactgcgtggcgccgactcgtttg

SEQ ID NO: 352 - protein, 288 aa, Corynebacterium glutamicum
GDIATPAFIPVATKATVKTLTPEQIRETGAQAILSNAYHLYLQPGPDIVDEAGGVSAFENWHGPTYTDSGGFQVMSLGSGFKKVLAMDTTNLTRNDIKAAKKERMALVDEDGVDFKSVIDGSKHRFTPEVSMQIQHQLGADIIFAFDELTTLVDTYDYQVESVERTRRWAQRCLLEHERLTQERVDKPLQSLWGVVQGAQFEDLRRQAVKGLLDLDRQAADEGRRGFGGFGIGGALEKENLGTIVGWVCDELPEDKPRHLLGISEPDDLFVAVEAGADTFYCVAPTRL

SEQ ID NO: 353 - DNA, 1014 bp, Corynebacterium glutamicum
  CDS (101)..(991): RXN01490
cacaccaatggtgactactgatccttgaagatcagccggaacgctgtctagtccactccaaatatccactgttttagactacggcatagactcaacagacatgaatgctcctgcccctaaacctggactcgtgatcgtcgacaagcccgccggaatgacatcccatgacgtggtgtccaaattgcgccgcgcattttccacccgcaaagtaggccacgcaggcaccctcgaccccatggcaaccggcgtgttagtcgtcggaattgagcgcggaacccgcttcctggcacacatggtggcctccaccaaagcctacgacgccaccattcgactcggcgccgccaccagcaccgatgatgcagaaggcgaggttatctccacaacagacgcatccggcctcgaccacagcaccatccttgctgaaatcgtcaacctcaccggcgacatcatgcaaaaacccaccaaagtctccgccatcaaaatcgacggcaaacgcgcccacgaacgcgtccgcgacggcgaagaagtagacattcccgcacgtcccgtcaccgtcagcgtctttgacgtgctcgactaccacgtcgacggtgaattttatgacttagatgtgcgcgtccactgctcctccggcacctacatccgcgcgctcgcccgcgacctcggcaacgctttgcaggtcggcggccacctgaccgcgcttaggcgcacagaggtcggcccttttacgcttaacgacgcgacccccctctccaaactccaagagaatccagaactctccctcaacctcgaccaggcactcacccgcagttacccagtccttgacatcaccgaagacgaaggcgttgacctgtccatgggcaaatggttggaacctcgcggactgaaaggcgtccacgctgcagtaacaccatcaggaaaagccgtggcgctcatcgaagaaaagggcaaacgcctggccaccgtgtttgttgctcaccccaacactctttagttggtctgccagaagccgat

SEQ ID NO: 354 - protein, 297 aa, Corynebacterium glutamicum
MNAPAPKPGLVIVDKPAGMTSHDVVSKLRRAFSTRKVGHAGTLDPMATGVLVVGIERGTRFLAHMVASTKAYDATIRLGAATSTDDAEGEVISTTDASGLDHSTILAEIVNLTGDIMQKPTKVSAIKIDGKRAHERVRDGEEVDIPARPVTVSVFDVLDYHVDGEFYDLDVRVHCSSGTYIRALARDLGNALQVGGHLTALRRTEVGPFTLNDATPLSKLQENPELSLNLDQALTRSYPVLDITEDEGVDLSMGKWLEPRGLKGVHAAVTPSGKAVALIEEKGKRLATVFVAHPNTL

SEQ ID NO: 355 - DNA, 1014 bp, Corynebacterium glutamicum; identical to SEQ ID NO: 353
  CDS (101)..(991): FRXA01490

SEQ ID NO: 356 - protein, 297 aa, Corynebacterium glutamicum; identical to SEQ ID NO: 354

SEQ ID NO: 357 - DNA, 1563 bp, Corynebacterium glutamicum
  CDS (101)..(1540): RXA01621
tctaatttcacatttagagcagtttttgcccacacttctactgggtagactcagattcgtgaattcccaggatgctcagaaccaagttcccccacagaaagtggaccaggaagtagaccgccttgctttaatggcgcgcgctcaccaggcaattggtgagctttcagacatccttgtgcccctagcggcagcattttccagcaagggacactccctatatttggtgggcggttccgtgagggatgctttcttaggtgagttggggcatgaccttgatttcaccacgtcggcacgccctgaggagacaaaggcgatcctggatgattacgccgatgtggtgtgggataccggaattgcgtttggcaccctttctgcagaaaagcatggtcagcagatcgaaatcacgacattccgttctgatctctatgacggaaactcccgcaaccctgaagtgaccttcggtgacaccttggaaggcgatctgattaggcgcgatttcaaggtcaacgccatggctgtggagatccaagccgatggtgaattaactttccacgatccagtgggtggcttggaagatctacttacccacactttggataccccagctactccggaacaatcattcaatgatgatcctctgcgaatgctgcgcgctgcccgctttgtttcccaactgaatttcacccttgcaccacgagttattaccgccatgactgaaatggcgcagcagattactcggatcactgtggaacgcatgcaggttgagttggacaaaatgatccttggcaaaaaccctgaggctggcattgacctcatggtggagtccggtatcgcgcagattatttatccggagatccctgcgatgcagatgactcaagatgaacacatgcagcacaaggatgtgtacgcgcactcgttgcaggtgatgcgccaagcgattgatcaggaagaagatggccctgacctggtgcttcgttgggctgctctgcttcatgattgcggtaagccagatactcgtgacttcaatgaggaaggccgcgtgagcttccatcagcatgaggtagttggcgccaagctggtgaggcgacggatgcgcaagctgaagtactcaaagcaaatggtcggcgatgtcgggcagttggtgttcctgcacatgcgtttccatggtttcagcgaaggccagtggacggattctgcagtgcgtaggtatgccgcagatgcgggtgaattgctgccacgtttgcacaagttagtgcgtgctgattgcaccacaagaaataaaaggaaggcagcacgactgcaagccacctacgatcatttggaagagcgcatcgcggagatcgccgcaaaggaagatcttgccagggtgcgcccagatttggatggcaatgagatcatggagattctgaacatccaagccggacctgaagtgggtaaggcgtgggcgtttttgaaggagcttcgtttggagcgcggtcctttggatcgtgaagttgccatcgcagagctgaagagctggtgggaaggagaaaacaatgagtgatttttatgccgacaggttgt

SEQ ID NO: 358 - protein, 480 aa, Corynebacterium glutamicum
VDQEVDRLALMARAHQAIGELSDILVPLAAAFSSKGHSLYLVGGSVRDAFLGELGHDLDFTTSARPEETKAILDDYADVVWDTGIAFGTLSAEKHGQQIEITTFRSDLYDGNSRNPEVTFGDTLEGDLIRRDFKVNAMAVEIQADGELTFHDPVGGLEDLLTHTLDTPATPEQSFNDDPLRMLRAARFVSQLNFTLAPRVITAMTEMAQQITRITVERMQVELDKMILGKNPEAGIDLMVESGIAQIIYPEIPAMQMTQDEHMQHKDVYAHSLQVMRQAIDQEEDGPDLVLRWAALLHDCGKPDTRDFNEEGRVSFHQHEVVGAKLVRRRMRKLKYSKQMVGDVGQLVFLHMRFHGFSEGQWTDSAVRRYAADAGELLPRLHKLVRADCTTRNKRKAARLQATYDHLEERIAEIAAKEDLARVRPDLDGNEIMEILNIQAGPEVGKAWAFLKELRLERGPLDREVAIAELKSWWEGENNE

SEQ ID NO: 359 - DNA, 1100 bp, Corynebacterium glutamicum
  CDS (1)..(1077): RXN01704
cgaggaattggcaacgccgggaagggggttaaggtaaccaccgcgtctgctgatcgtgtcgattcccggtgcccagcagcggcagcaggtgctggttgctgtgactatgcagaactcaacccaactgtggagcttgagatcaagtcccgcgtgcttcgtgatcagttggagcgcatcggtggaatcgatgagcttcctgaatttgagcttcaagatctggagccaacagctggttggcgtacccgcgttcgcctcggcgttgatgcgtctggtcgtgccgggttccgcaagctgaagtccaatgagttggttactgaggttgcgtgttctcaggttgtgccagagcttcttgagggccttgtgggtgagggcgctcgtcgtttcacccctggcgtggagatcattgcagctattgatgatgcgggtcagcgccacgttgtggaatcccgtaaggctcctcgtggtcgtcgtactgaaactgtgttgaaggtgctggaaggcactggcgaggtggagcagaaggtaggcgattacacctggaagttcccagtttcttccttctggcaggcgcacaccaaggcccctgcggcgtattcagagttcatcgccgaagcgttaaccggattggaactggttgacgtcgataagcgtggccctgttgcgtgggacctttatggcggcgtcggcctgttcgcgccgattatcaccagcaagctgcaggcagctgtccactctgtggagctgtccccaggttcagcggaggctggcgaagaggcgttggctggtttgcctgtcactttccacactggtcgggtagagggcatggcgtcccagctgccttcgccaaacgtggttgttttggatcctcctcgcaccggtgcaggcagtgacgtgttgaagagcatcgcggaggctaagcctcagctggttatccacattggttgtgacccggcgactttcgctcgcgacgttgccgattggaagctcaacggctacgaaatggatcaattggctgtttttaacgcgttccctggaactcaccactttgagacgattggtgtatttgtccgcgtttcctaaggcggattaagccttggcta

SEQ ID NO: 360 - protein, 359 aa, Corynebacterium glutamicum
RGIGNAGKGVKVTTASADRVDSRCPAAAAGAGCCDYAELNPTVELEIKSRVLRDQLERIGGIDELPEFELQDLEPTAGWRTRVRLGVDASGRAGFRKLKSNELVTEVACSQVVPELLEGLVGEGARRFTPGVEIIAAIDDAGQRHVVESRKAPRGRRTETVLKVLEGTGEVEQKVGDYTWKFPVSSFWQAHTKAPAAYSEFIAEALTGLELVDVDKRGPVAWDLYGGVGLFAPIITSKLQAAVHSVELSPGSAEAGEEALAGLPVTFHTGRVEGMASQLPSPNVVVLDPPRTGAGSDVLKSIAEAKPQLVIHIGCDPATFARDVADWKLNGYEMDQLAVFNAFPGTHHFETIGVFVRVS

SEQ ID NO: 361 - DNA, 839 bp, Corynebacterium glutamicum
  CDS (1)..(816): FRXA01704
gatgcgtctggtcgtgccgggttccgcaagctgaagtccaatgagttggttactgaggttgcgtgttctcaggttgtgccagagcttcttgagggccttgtgggtgagggcgctcgtcgtttcacccctggcgtggagatcattgcagctattgatgatgcgggtcagcgccacgttgtggaatcccgtaaggctcctcgtggtcgtcgtactgaaactgtgttgaaggtgctggaaggcactggcgaggtggagcagaaggtaggcgattacacctggaagttcccagtttcttccttctggcaggcgcacaccaaggcccctgcggcgtattcagagttcatcgccgaagcgttaaccggattggaactggttgacgtcgataagcgtggccctgttgcgtgggacctttatggcggcgtcggcctgttcgcgccgattatcaccagcaagctgcaggcagctgtccactctgtggagctgtccccaggttcagcggaggctggcgaagaggcgttggctggtttgcctgtcactttccacactggtcgggtagagggcatggcgtcccagctgccttcgccaaacgtggttgttttggatcctcctcgcaccggtgcaggcagtgacgtgttgaagagcatcgcggaggctaagcctcagctggttatccacattggttgtgacccggcgactttcgctcgcgacgttgccgattggaagctcaacggctacgaaatggatcaattggctgtttttaacgcgttccctggaactcaccactttgagacgattggtgtatttgtccgcgtttcctaaggcggattaagccttggcta

SEQ ID NO: 362 - protein, 272 aa, Corynebacterium glutamicum
DASGRAGFRKLKSNELVTEVACSQVVPELLEGLVGEGARRFTPGVEIIAAIDDAGQRHVVESRKAPRGRRTETVLKVLEGTGEVEQKVGDYTWKFPVSSFWQAHTKAPAAYSEFIAEALTGLELVDVDKRGPVAWDLYGGVGLFAPIITSKLQAAVHSVELSPGSAEAGEEALAGLPVTFHTGRVEGMASQLPSPNVVVLDPPRTGAGSDVLKSIAEAKPQLVIHIGCDPATFARDVADWKLNGYEMDQLAVFNAFPGTHHFETIGVFVRVS

SEQ ID NO: 363 - DNA, 942 bp, Corynebacterium glutamicum
  CDS (101)..(919): RXA02523
agtgtgtgaggcttcatgcctccagcgtagacctcttggtagattgaagtccgtgactagctccgaaaatcttgattcccaccgtctgcggcttgatgtcgtgaccattttccccgaatacctggatcctctgcgccatgccctgctgggtaaggcgattgaggatggcattttggaagtcggtgttcatgatcttcggaattgggcgaccggcggacacaaggccgtcgacgataccccgtatggcggtggcccgggcatggtgatgaagccagaggtctgggggccagcgcttgatgatgtcgccgcaggccgggtgagcggtgcggaactcgattcggcctcgctgcacctgaaaaatgtgcgccatgatgagctgggtggcgtcgaaaagcgtgcttatgtcgtggaagaagaccgcgacctgccgctgttgctggtgcccaccccggctggcaagccgttcacgcaggcggatgcgcaggcgtggtccaacgaggagcacattgtgttcgcgtgcgggcgctacgagggcattgaccagcgcgttattgatgatgccgccaaccgctaccgcgtgcgcgaggtatcgatcggcgattatgtgctgatcggcggggaagtggcagtcctggtcatcgcggaagccgtcgtgcgcctgatccctggcgtgctcggaaaccgtcgtagccacgaagaagacagcttctccgatggcctgctcgaaggcccgtcgtacacaaagccgcgcacctggcgcggacttgacgtccccgaagtactattctcgggcaaccacgccaaggtcgatcgctggcgacgcgatcaggcgctcctacgcacccaggcaattaggcctgagcttatcgacgcatccctcctcgattccaccgacctcaaagtattgggactggacaaatgacagagaccacacctcaaccc

SEQ ID NO: 364 - protein, 273 aa, Corynebacterium glutamicum
VTIFPEYLDPLRHALLGKAIEDGILEVGVHDLRNWATGGHKAVDDTPYGGGPGMVMKPEVWGPALDDVAAGRVSGAELDSASLHLKNVRHDELGGVEKRAYVVEEDRDLPLLLVPTPAGKPFTQADAQAWSNEEHIVFACGRYEGIDQRVIDDAANRYRVREVSIGDYVLIGGEVAVLVIAEAVVRLIPGVLGNRRSHEEDSFSDGLLEGPSYTKPRTWRGLDVPEVLFSGNHAKVDRWRRDQALLRTQAIRPELIDASLLDSTDLKVLGLDK

SEQ ID NO: 365 - DNA, 1068 bp, Corynebacterium glutamicum
  CDS (101)..(1045): RXA02243
ctgtttttgaagcgccttgatccagctgaacgtaaagcagccatgggcgttattcgcgcgtctgcatggtttaacaaataatgagtggaaagggcacttcatgcgcctagtttttgccggaactccggaacctgcagtggtggcactgcaaaagctcattgattccgatcatgaggtcgtcgctgtgttgacgcaaccagatgcacgtcgcggccgtggtcgtacgctgcatccttcagctgtcgcggagcttgcacagcagcacggtattgaggtgttaaagcccacctccctgaaggctgatacggaagatggccaagcaatccgtcagcgcttggctgagcttgcccccgattgcttgccggtggtggcatacggacagctgatcaccaaggatttgctggatgttgcgccacacggttgggtgaatctgcacttttctttgcttcctgcatggcgtggggcggcgccggttcaggcgtcgatccgtgaaggcgatcagatcactggtgccacgaccttccgcattgatgagggcctggataccggcgtgattttgtccaccatcgaggacacaattcagcccaccgatactgcggatgatcttcttactcgcctggcgtattcaggcggtgacctgctggttgagaccatgactggcctggagcagggcacaatcaccccgcgcgcccaggaaggcgaggccacgtacgcctcaaaaatcaccacccaggacgcgcagattgattggtcgaagcccgccgaggtcatcgaccgccacatcagggcacataccccaggacctggcgcatggaccacgcttgtcgacgcccgcctcaaggtcgggcccatcagccactcaggcgaggtcgaagtagcagcggacttggcgcctggcgccatcctggcgcaaaagaactccgtggtggtcggaacgggcaccacaccaattgttctgggcaatatccaacccccgggaaagaaaatgatgaatgcagcagactgggcgcgtggtgtccaacttgatcaggaagcgaaattccaatgagcctagaaaaatccggcgga

SEQ ID NO: 366 - protein, 315 aa, Corynebacterium glutamicum
MRLVFAGTPEPAVVALQKLIDSDHEVVAVLTQPDARRGRGRTLHPSAVAELAQQHGIEVLKPTSLKADTEDGQAIRQRLAELAPDCLPVVAYGQLITKDLLDVAPHGWVNLHFSLLPAWRGAAPVQASIREGDQITGATTFRIDEGLDTGVILSTIEDTIQPTDTADDLLTRLAYSGGDLLVETMTGLEQGTITPRAQEGEATYASKITTQDAQIDWSKPAEVIDRHIRAHTPGPGAWTTLVDARLKVGPISHSGEVEVAADLAPGAILAQKNSVVVGTGTTPIVLGNIQPPGKKMMNAADWARGVQLDQEAKFQ

SEQ ID NO: 367 - DNA, 1218 bp, Corynebacterium glutamicum
  CDS (101)..(1195): RXA00217
ccaaataaaagaaattcgggatttcgggaacatgcggatacgctacgttgttgagattaattaagtaaacgtaggcagaaagctttgtagaggggagatcatgcgggttcttgcagcaatgagtggaggcgttgattccgccgtcgcggcgtcacgcgcggtcgcagctggtcatgaagtggttggcgtgcatttggcgttgtcgcaagatccgcaaacggtgcgtgagtcttcgcgcggttgctgctctctggaagattccgctgatgctcgtcgcgtgtgtgacaagttgggtatcccgttttatgtctgggatttctcggatcgtttcaaggaagatgtgatcgacaacttcattgattcttacgcgatcggtgagactccaaacccttgcctgcgttgtaatgagaaaatcaagtttgccgccttgcttgagcgtggcatcgcgcttggtttcgatgcagtggttaccggccactacgcgcgcttgacccagcctgctgatggtggcgatggctacttgcgtcgcggagttgatcccaacaaggatcagtcttacgtgcttggtgtgcttggcgctcatgagatcgagcactgcatgttcccagtcggcgataccatcaagcctgaaatccgtgaagaagccagtgctgcaggtttctctgtggcaaagaagccagactcctacgacatttgcttcattccggatggcaacacccaggcgttcttgggcaagcacatcggtatgcgtccgggcatgatcgtggatcaggaaggcacgcatctccgtgagcacgctggtgtccatgaattcaccattggtcagcgcaagggccttgacattaaggctccagcagccgatggtcgtccacgttacgtcaccgatattgatgccaagaccggcaccgtcaccgttggtactcgcgaaaacctaaagatcagcaccatccacgccgatcgtttgaagttcctccatccagcgatggacggacagatcgattgcgaagtccaggtccgcgcacacggtggagtagtttcctgctctgcgacgattgatcgtgacgctgatttcatggtgctcaacctcaatgaacctcttcagggtgttgctcgcggccaggcagcagtgctgtacctgcctgacgcggatggtgacatcgttcttggatcaggcaccatctgccacacggagtcttaagaaaattgggcgcttatggt

SEQ ID NO: 368 - protein, 365 aa, Corynebacterium glutamicum
MRVLAAMSGGVDSAVAASRAVAAGHEVVGVHLALSQDPQTVRESSRGCCSLEDSADARRVCDKLGIPFYVWDFSDRFKEDVIDNFIDSYAIGETPNPCLRCNEKIKFAALLERGIALGFDAVVTGHYARLTQPADGGDGYLRRGVDPNKDQSYVLGVLGAHEIEHCMFPVGDTIKPEIREEASAAGFSVAKKPDSYDICFIPDGNTQAFLGKHIGMRPGMIVDQEGTHLREHAGVHEFTIGQRKGLDIKAPAADGRPRYVTDIDAKTGTVTVGTRENLKISTIHADRLKFLHPAMDGQIDCEVQVRAHGGVVSCSATIDRDADFMVLNLNEPLQGVARGQAAVLYLPDADGDIVLGSGTICHTES

SEQ ID NO: 369 - DNA, 735 bp, Corynebacterium glutamicum
  CDS (101)..(712): RXA01223
gcgggagtggacgggccgccagccatcggggcgacaatcacgggagttttcaacgtgtcaaggatgctcatggcaccatcctaggcgcgcctgccataggatgacttccgtgagttttttgtctaaaatccaagcactgtttgcccccaagcctgaacttcccgccgccaaatggctggtcgtgggcctgggcaaccccggcgccaagtacgaatccacccgacacaacgtcggttacatgtgccaagacatgcttatcgacgcccaccagcagcagcccctcacccccgccacgggctacaaggccctcacaacgcagctcgcaccaggggtgctcgccgttcgatccaccacttttatgaaccactccggccaaggtgtcgcaccgatcgccgcagcgttgggtatcccagcagagcgcatcatcgtgatccacgacgagctcgatctgcccgctggaaaagtacgcctgaaaaagggcggaaacgaaaacggtcacaacggcctgaaatccctcacggaagagctcggcaccagagactacctgcgcgtccgcatcggcatttcacgaccaccagcaggaatggccgtgcccgactacgttttggaaccagtcgatcacgaccaaccaggcattgaacttgccgccgaggcagtggatttgctgctggcccagggattatctgctgcgcaaaacgctatccacagccgctagattgctagagattcccgcac

SEQ ID NO: 370 - protein, 204 aa, Corynebacterium glutamicum
MTSVSFLSKIQALFAPKPELPAAKWLVVGLGNPGAKYESTRHNVGYMCQDMLIDAHQQQPLTPATGYKALTTQLAPGVLAVRSTTFMNHSGQGVAPIAAALGIPAERIIVIHDELDLPAGKVRLKKGGNENGHNGLKSLTEELGTRDYLRVRIGISRPPAGMAVPDYVLEPVDHDQPGIELAAEAVDLLLAQGLSAAQNAIHSR

SEQ ID NO: 371 - DNA, 475 bp, Corynebacterium glutamicum
  CDS (9)..(452): RXA01226
ttgaggttgcagaagaactagtgtcgcgcagctttggatcatttagtgtgcacaagcgctccaacaccgatatcgcgcagcttcctgggctaattgtggccaagccgcgcagctttatgaacctgtcgggaactccgattcgggcgctgtgtgacttctttaagatttccccagccaatgtcatcgtggtgcatgatgaattggagcttgatttcggctcagtgaagctacgtcagggtggcggggatcatgggcacaatggtctgaaatccacgtccaaatctttgggaactaaggactattggaagctcagcatgggtatcggtaggccaccgggtcggatggatccggcaagttttgtgttgaagccttttggcaagcaagaactggcggatattcccatcatggcggctgacgctgcagatctcgtcgaaaagcatttgcagcagggctagctacttgcgccgcgcctctt

SEQ ID NO: 372 - protein, 148 aa, Corynebacterium glutamicum
AEELVSRSFGSFSVHKRSNTDIAQLPGLIVAKPRSFMNLSGTPIRALCDFFKISPANVIVVHDELELDFGSVKLRQGGGDHGHNGLKSTSKSLGTKDYWKLSMGIGRPPGRMDPASFVLKPFGKQELADIPIMAADAADLVEKHLQQG

SEQ ID NO: 373 - DNA, 1614 bp, Corynebacterium glutamicum
  CDS (101)..(1591): RXA00209
acaagaccctcgatgctgcggctgcgttggaccaagcgcccgctgtcgaggatggacgttttatggttccgcagattctgggtgagggcgactaataattatgaccaacaagtacctggttgaaggctctgaaaacgagctgaccacaaagaccgcagcagagctggcaggtcttattcattcccgcgaggtaacttcccgcgaggttactcaagcgcacctagatcgcattgctgcggttgacggcgatattcatgcatttctccacgttggccaggaggaggccctgaacgcggcggatgacgtcgataagcgtctagacgctggagaggcacctgcctcggctttggctggcgtgccgcttgcgctgaaggatgtctttaccaccactgatgcgccgaccacggcggcatcgaagatgcttgagggctacatgagcccttatgacgcgactgtgacccgcaagatccgtgaggctggcatcccaattttgggtaagaccaacatggatgagtttgcgatgggttcctccactgagaactccgcatacggcccaacccacaatccgtgggatctggagcgcaccgcaggtggttctggtggtggctcttcagctgctcttgctgcaggtcaggcgccacttgcgattggtactgacactggtggatccatccgtcagccagctgcgctgaccaacactgtcggtgtgaagccaacctacggaaccgtatcccgttacggtctgattgcgtgtgcgtcctccctggatcagggtggcccaaccgctcgtactgttctggataccgcgcttttgcacgaggttatcgcaggccacgacgcttttgatgcgacctccgtgaatcgtccggttgctcctgttgtgcaggctgcccgtgaaggcgcgaacggtgacctgaaaggcgtgaaggtcggtgtggtcaagcagttcgaccgcgacggctaccagcctggcgtgcttgaggcattccacgcttctgttgagcagatgcgctcccagggtgcggaaatcgtcgaggttgattgccctcactttgatgacgctcttggcgcgtactacctgattcttccttgtgaagtttcctccaacctcgcgcgttttgacggcatgcgttacggtttgcgcgctggtgatgacggaactcgttccgccgatgaggtcatggcgtacacccgtgcgcagggattcggccctgaggttaagcgccgtatcatcctcggcacttacgcgttgtctgttggttactacgacgcgtactacctgcaggctcagcgcgttcgtaccctcattgcacaggacttcgccaaggcttacgagcaggtcgacatcttggtgtccccaaccactccaaccaccgcgttcaagctgggggagaaggtcaccgatccgctggagatgtacaacttcgacttgtgcaccctgccactgaacctggctggtctcgcgggcatgtccctgccttccggcttggcatcagatactggtctgcctgttggtttgcagctgatggctcctgctttccaggacgatcgtctctaccgcgtcggcgctgcttttgaagctggacgcaagtaggttctaaaccctttttaaga

SEQ ID NO: 374 - protein, 497 aa, Corynebacterium glutamicum
MTNKYLVEGSENELTTKTAAELAGLIHSREVTSREVTQAHLDRIAAVDGDIHAFLHVGQEEALNAADDVDKRLDAGEAPASALAGVPLALKDVFTTTDAPTTAASKMLEGYMSPYDATVTRKIREAGIPILGKTNMDEFAMGSSTENSAYGPTHNPWDLERTAGGSGGGSSAALAAGQAPLAIGTDTGGSIRQPAALTNTVGVKPTYGTVSRYGLIACASSLDQGGPTARTVLDTALLHEVIAGHDAFDATSVNRPVAPVVQAAREGANGDLKGVKVGVVKQFDRDGYQPGVLEAFHASVEQMRSQGAEIVEVDCPHFDDALGAYYLILPCEVSSNLARFDGMRYGLRAGDDGTRSADEVMAYTRAQGFGPEVKRRIILGTYALSVGYYDAYYLQAQRVRTLIAQDFAKAYEQVDILVSPTTPTTAFKLGEKVTDPLEMYNFDLCTLPLNLAGLAGMSLPSGLASDTGLPVGLQLMAPAFQDDRLYRVGAAFEAGRK

SEQ ID NO: 375 - DNA, 420 bp, Corynebacterium glutamicum
  CDS (101)..(397): RXA00210
tgtccacctcgtgcagtaagataaaccaacagttgcgcatgcgtgcgcaagttaaattttcttgtacccattgtgactagcgaagaggatcagaaaccaagtgcctgagatttcgcgcgaccaggtcgctcaccttgccaaactttccagactggcgctcactgaggaagaactcgagcagtttgctggacagatcgatgacattgtcggatatgtttccgcagttcaaaacgtcgacgccgcaggtgttgagcctatgagccacccgcacagcatcgccaccaccatgcgtgaagatgtcgtgcacaagaccctcgatgctgcggctgcgttggaccaagcgcccgctgtcgaggatggacgttttatggttccgcagattctgggtgagggcgactaataattatgaccaacaagtac

SEQ ID NO: 376 - protein, 99 aa, Corynebacterium glutamicum
VPEISRDQVAHLAKLSRLALTEEELEQFAGQIDDIVGYVSAVQNVDAAGVEPMSHPHSIATTMREDVVHKTLDAAAALDQAPAVEDGRFMVPQILGEGD

SEQ ID NO: 377 - DNA, 1260 bp, Corynebacterium glutamicum
  CDS (101)..(1237): RXA02686
cttcttcggtgaaggttccggcaggccccaaataggccacaacagttggtgcgtcgctcatggttacacagcttaacccgccgaactaaggtgggtgtccatgtctgttgctcaattagcgaaccgcttggcccaactctcccccgccgagcatggttttgcatggttcgaccctgaaatcaccgctggccatggcgttggcccgttgcatggcatggtgattccagccaaggacctcaacgatgtcgcaggcatgcccaccgcgttcggaaatgcatctcggcgaaaggtagcaacagataccgatccgttcatccaaaatctcatcgaccgcggcgcgatcatcgctggcaaaacccaaaccagcgagctcggcatgacggcgtattgcgaacccatcgacatggacgcacccagcaacccggttttgcctggtcacacgcccggcggttcgtcgggtggtgcggcggttgccgttgccaggtcgcttgtcgacgccgcccacgcctcagacggaggcggctcgatccgggttccagccgccgcgtgcgggctggtcgggtttaaacccgcccacgattccagcggcggaaacccctccacgcaggggtttatcacccgcgatgtggccacccaagtgcgcttgcacgcacttcaaccacgcaccaggcgcctgcgcatcggcgttctcgctgagcccatccatgctaattcgcttgtcgacgcccccttcctgagcatcctcgaatccaccgcccacctcctggagaaagctggccacgaaatagtgtccgtacccctcccttatggcgcttgggcttttgacgcttatacagaagttttcatgatgaaatccgctggactaaccaacctgggtagccccattacaagatggttgagtgaacaaggccgtagtctttctccttctgatagacaatcaagtgtcaaggcttttgattccgtggctgagactgtacacggagcatgggacatcgatgttttattaacccctaccttggcttatgcacctcccaagattgggtacttttcatccatgccacctgaagaagacttccttgcacaaaccaaatggacgccgtgggcaacgctgttcaacatgaccggtggtgcagccatcagcgtgcctgttgaaggtgtcggcattcatcttggtgggatacgcgtacgagatgaagacctcttaggattagcagcatttgtggaaagagctgtggcatgagtagttcagtaatgtcaccg

SEQ ID NO: 378 - protein, 379 aa, Corynebacterium glutamicum
MSVAQLANRLAQLSPAEHGFAWFDPEITAGHGVGPLHGMVIPAKDLNDVAGMPTAFGNASRRKVATDTDPFIQNLIDRGAIIAGKTQTSELGMTAYCEPIDMDAPSNPVLPGHTPGGSSGGAAVAVARSLVDAAHASDGGGSIRVPAAACGLVGFKPAHDSSGGNPSTQGFITRDVATQVRLHALQPRTRRLRIGVLAEPIHANSLVDAPFLSILESTAHLLEKAGHEIVSVPLPYGAWAFDAYTEVFMMKSAGLTNLGSPITRWLSEQGRSLSPSDRQSSVKAFDSVAETVHGAWDIDVLLTPTLAYAPPKIGYFSSMPPEEDFLAQTKWTPWATLFNMTGGAAISVPVEGVGIHLGGIRVRDEDLLGLAAFVERAVA

SEQ ID NO: 379 - DNA, 886 bp, Corynebacterium glutamicum
  CDS (101)..(886): RXA02625
ctcaattaagcagcaatccgagccgggggagcgctgtcagaaatggaccgtgccaccccatgacaacatgcttgcacaatgatgactagaataatgacccatgactgcagccttttatgatctgatggacttcgatgaagttctagagaaatatgacccggtgatgggacttgaggtccacgtcgaactgggcactgagaccaagatgttctctgcatcttctgcacactttggcgctgaacccaatagcaatgttgacccagtttctttgggtctcccaggcgcacttcctgtggttaacgccaagggcgtggagtgggcaattaagattggactggcgctgaactgcagcatcgctgagtcctcacgctttgcacgtaagaactacttctacccggatcagcctaagaactaccagatctcccagtatgacgagccaatcgcatacgacggctacctggatgttgttctggaggacggcaccgagtggcgtgtggaaatcgaacgcgctcacatggaggaagacaccggaaagctcacccacctgggtggtacttctggtcgtattcacggcgcaaccgcttctttggtggactgcaaccgtgcaggcgtccctttgattgaggttgtcaccaagccaatcgaaggcgctggcgctcgcgctccagagatcgctaaggcttatgtctccgcactgcgcgatctggttaaggcgctcggtgtgtccgacggccgcttggatcagggttctatgcgtgtcgacgccaacctgtccctgcgcccgatcggccaggaggaattcggcacccgtaccgaaaccaagaacatcaactccctgaagtccgttgagcaggccagcacctttgagatgcagcgccaggctcag

SEQ ID NO: 380 - protein, 262 aa, Corynebacterium glutamicum
MTAAFYDLMDFDEVLEKYDPVMGLEVHVELGTETKMFSASSAHFGAEPNSNVDPVSLGLPGALPVVNAKGVEWAIKIGLALNCSIAESSRFARKNYFYPDQPKNYQISQYDEPIAYDGYLDVVLEDGTEWRVEIERAHMEEDTGKLTHLGGTSGRIHGATASLVDCNRAGVPLIEVVTKPIEGAGARAPEIAKAYVSALRDLVKALGVSDGRLDQGSMRVDANLSLRPIGQEEFGTRTETKNINSLKSVEQASTFEMQRQAQ

SEQ ID NO: 381 - DNA, 659 bp, Corynebacterium glutamicum
  CDS (1)..(636): RXA01398
aaggaaaccgctgaggattaccgttacttcaacgatcctgacctgcctccagtgattgcgcctcgtgagtgggtggaagaaatccgcgcaactcttccagagctgccttgggttcgccgtgcacgtatccaggaagagtggaagctttccgacgccgagatgcgcgacctcatcaacgccaacgcgctcgacctcatcatcgagaccgtggaagcgggtaccactcctgatgaagctcgtgcttggtgggtttcttacatctctcagaaggctaacgagtctggtgtcgagctcgatgctctcggtgttgcgccagctcacgttgctcgcgtcgttgcgcttgtttctgaaggcaagctgaccaataagctggcacgtcaggctatcgacggcgttattgctggcgaaggcgatgtggacgcggttgttgctgctcgtggactggaagttgttcgcgatgacggcgcaattgaaaaggctgtcgatgatgccttggctgcaaacccagacatcgtggagaagtaccgcgctggcaacaccaaggtcaccggcgccatcgttggtgctgtcatgaaggcgacccgcggtaaggctgacccagctcaggtgaaccagctgatcgcaaagaagttggcttaagctttttgccgttgagctgc

SEQ ID NO: 382 - protein, 212 aa, Corynebacterium glutamicum
KETAEDYRYFNDPDLPPVIAPREWVEEIRATLPELPWVRRARIQEEWKLSDAEMRDLINANALDLIIETVEAGTTPDEARAWWVSYISQKANESGVELDALGVAPAHVARVVALVSEGKLTNKLARQAIDGVIAGEGDVDAVVAARGLEVVRDDGAIEKAVDDALAANPDIVEKYRAGNTKVTGAIVGAVMKATRGKADPAQVNQLIAKKLA

SEQ ID NO: 383 - DNA, 1026 bp, Corynebacterium glutamicum
  CDS (101)..(1003): RXA02228
acagaagcgtcaactgctcaacttctcgacagcgacgacacacacggcgtgggacgctacgttgctcgctggactttttaacttaagggagatctagatcgtggtaacaccgatcgcagtggttggacccactgcatctggaaaatcagctttgggaattgctctagcccacaagcttgacggtgaagtagtcaatgtggattccatgcagctgtacaaaggcatggacatcggcacggcaaagctgactgtcgaagaacgcgaaggcattgcgcatcatcagctcgatgtctgggacgttaccgaaactgcgtcagtggcgaggtttcaatccgacgccgttgccgatgtggaagatattatgtcccgtggcaaaacccccatcttggttggcggctccatgttgtacgtccaatctttggtcgatgattggcaattcccacctaccgacagcgctgttcgcgcacgctttgaggcccgcttggcagacatcggtgtcgaagcactacacgctgaacttactcagcttgacccagaagcagcagccgtcatcgaaagcaatgatccccgacgcaccgtccgagcattagaagtcattgaactaaccggccagcccttccaagcaagccaaccgcccaaagacgcgccacctcgctggggaactcgaatcattggcctgaaaaccactccagaatggctaaatccacgcatcgagcagcgcaccgccaggatgtttgaacaaggctttgtcgccgaagtggaacaccttgtgcagcaaggactcatcgctgactccaccgcgggacgagcaatcggctactcccaagtactggcagccatggcaggggagatgacctgggaagacgccttcgaacgcacggtcaccggaaccagacgctatgtcaggcgccaacgcagctggttcaacagagaccaccgcgtgtcctgggtcgacgcctctggcgatcccaccgcacaagccttggagattttgggtctacaatagcgagggtgaatttgaccatc

SEQ ID NO: 384 - protein, 301 aa, Corynebacterium glutamicum
VVTPIAVVGPTASGKSALGIALAHKLDGEVVNVDSMQLYKGMDIGTAKLTVEEREGIAHHQLDVWDVTETASVARFQSDAVADVEDIMSRGKTPILVGGSMLYVQSLVDDWQFPPTDSAVRARFEARLADIGVEALHAELTQLDPEAAAVIESNDPRRTVRALEVIELTGQPFQASQPPKDAPPRWGTRIIGLKTTPEWLNPRIEQRTARMFEQGFVAEVEHLVQQGLIADSTAGRAIGYSQVLAAMAGEMTWEDAFERTVTGTRRYVRRQRSWFNRDHRVSWVDASGDPTAQALEILGLQ

SEQ ID NO: 385 - DNA, 1515 bp, Corynebacterium glutamicum
  CDS (101)..(1492): RXA02502
aatgctttgttgtgatgtccgcgaatgaaagctaccgtattttaatcaactaggattcattcttttggtggatcaaaggctccgttgaaagtcgggtggaatggtgagtgtactcatcgtagggatgtcgcacaggtctgcgcctgtgtcgcttcttgaacgtctgagcatggatgattcagtacgtggtgaaacaactcaagcactcctgggtagggcgtctttaagcgaggccctcattgtctctacgtgtaaccgcctggaggtctacaccgtcactagcagtttccatactggtgttaatgatgtggtggaggttctccatgaggcaagtggcgtagatattgaaactttgcgcggatatctttatgtccgttacgccgatgctgctgctgaacacatgttggtggtgacttccgggttggattccatggtgttgggtgagcagcagatcattggtcaggtgcgcactgcgtaccaagcagctaatgaatatggttctgtcggtcctgctttgcattcacttacccagaccgcgctgcataccggcaagcgcgtgcattcggagactgctattgatgatgctggtgcatcgatggtgtctttcgctgtggatcgcgcgttggtgcagatgggtcttgattcggaggcagaagccccactatctggcaagacagccttggtgttgggcgctggcgcgatgagttctcttgcagccactcaccttggtcgcgctggaatttccaacttgatcatggccaaccgcactctggaacgtgccgaaaggcttgcggagcattccctagaagccggagttcctgcagaggttgtggaatacgatcagcgagcttccgcctacaatcgcgttgacctggtagtttccgccacgggagcggatgatttcaccgtgaagcctgaggatattccagaaggtgcttcgttgatgttggtggatttgtccatgccacgagacatcgatgatgcttgtgcggatctgccgggcgttgatttggtgaacatcgaacgcctgcacaaggcctcccgtgagggtggatcgggcatggcgccaagcgaggaagaagctttggcgattgttcgggaagagttggattctttcacctctgagcagcgcattcgcgatatcgttccagctgtgtccgcgttgcgcaggcaggccgcgtcggtgggaagcgatgaattggatcgactccgccaacgtgcccccgggatttccgaggtggaatggggggaagtggagaaaacagggagacgggtcgtcgataagcttcttcatgaacccactgtgcgcgtcaaggaactggcggcccggtccggcagcatctcttatgattcagctctgcaagagctgttcggtttggagtcgctggcgagcaccgcagcaccggcaaccacgtccgtcaacgcgtcagaactgccggatgcgggtatcgtcgcattcgtgaacgcaccttctgccacacaaacgagggagtaacatgaccttaaaaattggta

SEQ ID NO: 386 - protein, 464 aa, Corynebacterium glutamicum
MVSVLIVGMSHRSAPVSLLERLSMDDSVRGETTQALLGRASLSEALIVSTCNRLEVYTVTSSFHTGVNDVVEVLHEASGVDIETLRGYLYVRYADAAAEHMLVVTSGLDSMVLGEQQIIGQVRTAYQAANEYGSVGPALHSLTQTALHTGKRVHSETAIDDAGASMVSFAVDRALVQMGLDSEAEAPLSGKTALVLGAGAMSSLAATHLGRAGISNLIMANRTLERAERLAEHSLEAGVPAEVVEYDQRASAYNRVDLVVSATGADDFTVKPEDIPEGASLMLVDLSMPRDIDDACADLPGVDLVNIERLHKASREGGSGMAPSEEEALAIVREELDSFTSEQRIRDIVPAVSALRRQAASVGSDELDRLRQRAPGISEVEWGEVEKTGRRVVDKLLHEPTVRVKELAARSGSISYDSALQELFGLESLASTAAPATTSVNASELPDAGIVAFVNAPSATQTRE

SEQ ID NO: 387 - DNA, 897 bp, Corynebacterium glutamicum
  CDS (101)..(874): RXA02182
gacctgtggcagctttcgtgccgacgttttctgaagtcaatgactacctatggagcactgcacagcaagtgtaggtcgctcgactgttattctcggggctgtgaaaaagcttgcatccatagcgatcctctccagcctccctttggcttcgtgttccactcctccaacagattcagaggctgtcgttgagcatctggttccagaaattatctccacccactcttttgattccacctcgtttactcaggggttggaattagatggcgacgagctgattgtgggaactggccaatacggtggttcccgaatctatcgcagctccgttgatggccaggaatctgtttcccaatcgcttgatccagaattcttcggtgaaggcatcaccaagtctggtgatgccatctggcagctgacatggaatgaaggtgtcgctttcaagcgtgatgcagatactctcgaggagttagatcgcgtttcatataatggccaggggtggggaatttgctcaactgacgatgccctcatcacctctgatggaagctccaccctcacctttagggatccggaaacctttgcagagaacagcactgtagatgtgacactagacggctctccggttgggaacctcaatgagctcgaatgcgttgatggcgaggtatatgccaatattttcctcgatacagacatcatgcgaatcgatccgaactccggcgaagtcaccgcagtgatcgatgcctcaaatattcctaacaacgccacaccagatacaaacaatgtgctcaacggcattgcacatattccggattccgatcgtttttatatcactggtaagcgttggcctgacctctatgaggttagattcgtccctgctgactagaatcaagactcatggcaagc

SEQ ID NO: 388 - protein, 258 aa, Corynebacterium glutamicum
VKKLASIAILSSLPLASCSTPPTDSEAVVEHLVPEIISTHSFDSTSFTQGLELDGDELIVGTGQYGGSRIYRSSVDGQESVSQSLDPEFFGEGITKSGDAIWQLTWNEGVAFKRDADTLEELDRVSYNGQGWGICSTDDALITSDGSSTLTFRDPETFAENSTVDVTLDGSPVGNLNELECVDGEVYANIFLDTDIMRIDPNSGEVTAVIDASNIPNNATPDTNNVLNGIAHIPDSDRFYITGKRWPDLYEVRFVPAD

SEQ ID NO: 389 - DNA, 786 bp, Corynebacterium glutamicum
  CDS (101)..(763): RXN00211
tgagccaaaatcaataaggtgtttttcagcctgaggtaaaaatacggtggtactgtcgaaaccaatcatcccctagttttgaaaagaaggaagcgagccaatgtcattcctgatccgcgtcctgttgtccgacaccccaggcagcctcgcgttactcgctgaagcccttgggattgtagaggccaatattcaatccgtggacgtggtggaacgcttccccaatggcacggtcatggacgatctggtgatctccatccctcgcgatgtcatggcagacaccatcatcaccgcagctgaagaagtcgacggcgtggagattgattccatccgcccattctccgggactgttgaccgccgcggacagatccaaatgctggctgctgttgctcaccaacgccgcgatatcaccgcagcgatggaagaaatggtcgatgtcatcccccgcaccatgacctctggttgggctttggtcattgatctaaaaggacccatcactcgcatcgctggttccctagcagcgcccgaagatgacggcaccgttccggagaacatcgttctcaaagaagctcgcatgctcaacccggaaaacgatccgtggattccagagtcctggacactgcttgattcttcccttgccatcgctccgatcggcaagcacggcctggctctgattatcggtcgccctggtggccctgatttcttggccagcgaagtggagcacttaggccaagtcggtgacattatcggagcaatgcttcaaaaataatctgagctgtttaaaaaatg

SEQ ID NO: 390 - protein, 221 aa, Corynebacterium glutamicum
MSFLIRVLLSDTPGSLALLAEALGIVEANIQSVDVVERFPNGTVMDDLVISIPRDVMADTIITAAEEVDGVEIDSIRPFSGTVDRRGQIQMLAAVAHQRRDITAAMEEMVDVIPRTMTSGWALVIDLKGPITRIAGSLAAPEDDGTVPENIVLKEARMLNPENDPWIPESWTLLDSSLAIAPIGKHGLALIIGRPGGPDFLASEVEHLGQVGDIIGAMLQK

SEQ ID NO: 391 - DNA, 1005 bp, Corynebacterium glutamicum
  CDS (101)..(982): RXN00669
tttactgcgggcattttacgtatctgcaccccgcccggctgcgctgagcagccgtaaagcgtggggcgtgacgtcgaaaagcaaaaaatgaaaggcagacatggacaattcaacggtgcgaatccggctggatctagcgtatgacggcacggattttcatggctgggcgaagcaggggaccagcgatctacgcaccgtgcaaaaagtgttggaagacaatttgagcatggtgctgcgtgagactgttgaattgactgtggccgggcgaaccgatgcgggggtgcatgcggcgggccaggtggcgcactttgatattccggcacacgctttagagcagcgcagtattgatggcgatccaagcaagttggttcggcgcttgggtcggttgctgcccgatgatattcgggtgcatggcgtacgttttgccgagcccgggtttgatgcgcgattttccgcgatgcgcaggcactacgtttatcgcattacgacgcatcccgccggcgcgctgcctacgcgccgccacgacacggcgcagtggccaaaacctgtcgaactagagcggatgcaattagccgccgatgcactgctggggctgcatgattttgtggcgttttgcaaagctaagccacatgcgacgacggtgcgtgaactacaaaaatttgcgtggaaagacgtctccactgacatcgaaccgcaggtgtatgaagcacacgtggtggccgatgctttttgctggtcgatggtgcgctcgctggtcggctcctgcatggccgtgggcgaaggacgccgcggatcagggtttactgcagaattgcttgatgcaagcgaacgcagccccatggttccagtagcacctgcgaaaggtttgagcttggttggcgtggattatccttccgctgataagttacaggaaagagcgctggaaacccgagctgttcgcgagtttccggacgcgtccgcgagcctaaaactagatgatgagtaaaagggactaaactcgtctct

SEQ ID NO: 392 - protein, 294 aa, Corynebacterium glutamicum
MDNSTVRIRLDLAYDGTDFHGWAKQGTSDLRTVQKVLEDNLSMVLRETVELTVAGRTDAGVHAAGQVAHFDIPAHALEQRSIDGDPSKLVRRLGRLLPDDIRVHGVRFAEPGFDARFSAMRRHYVYRITTHPAGALPTRRHDTAQWPKPVELERMQLAADALLGLHDFVAFCKAKPHATTVRELQKFAWKDVSTDIEPQVYEAHVVADAFCWSMVRSLVGSCMAVGEGRRGSGFTAELLDASERSPMVPVAPAKGLSLVGVDYPSADKLQERALETRAVREFPDASASLKLDDE

SEQ ID NO: 393 - DNA, 1053 bp, Corynebacterium glutamicum
  CDS (101)..(1030): RXN02651
cgatttcttgcggcgtcgtggtgttcctgatcggaatgttccttgaggaccgtgaaaacgcccagcatgccaaagcaactgacgagaaggatgaggcctgatgaacaaccgacaaagcagaacccttcccgtaccagaaggactggcaggcatgcgtgtggacgcagcactgtccaagttgctgggaatttcacgcaccgtagctgcagaactcgccaccgccggcgatgtcagcgttgatggggctgtggtaggtaaaagcgagcggctcgttgccgattccatgctggatgtcttgctgcctgaaccagcagctccgttgatgcccaaggaagaaatcgttcccggcctggatattttgtactctgatgacgatgtcatcgcagtcaacaaacccgtcggcgtggcggcacatcccaccgtgggttgggaaggcccaactgtggtgggcggacttgcagctgcaggtttccgcatttccacctccggcccaccagagcgcaagggtattgtgcagcgccttgacgttggcacgtctggcgtgatggtggttgctgcctctgaacgtggatacaccgtgctcaagcgcgctttccgggaccgcaccgtggacaagacctaccacgcgttggtgcaaggccaccctgatccgctgaccggaaccatcgaagcaccgatcggccgccacccctcagcaggttggcgtttcgcagtaacaactgaaggcaaacacgccgtcacacactacgaaaccctggaggccttccaagaggcaaccctgctgaaaatccacctggaaactggccgcacccaccagatccgcgtgcatttctccgcgctgcaccacccatgctgtggcgaccccatgtacggctctgatcctgcgttgtccgagcgccttggccttaaccgtcagtggctgcacgccgtctcgcttggattcaaccacccagcagatggccgatggatggaaatcgtctccccatatccaactgatctccaacacgctttagacgttctccgcgagcaataatggatggtgtcgataaaggg

SEQ ID NO: 394 - protein, 310 aa, Corynebacterium glutamicum
MNNRQSRTLPVPEGLAGMRVDAALSKLLGISRTVAAELATAGDVSVDGAVVGKSERLVADSMLDVLLPEPAAPLMPKEEIVPGLDILYSDDDVIAVNKPVGVAAHPTVGWEGPTVVGGLAAAGFRISTSGPPERKGIVQRLDVGTSGVMVVAASERGYTVLKRAFRDRTVDKTYHALVQGHPDPLTGTIEAPIGRHPSAGWRFAVTTEGKHAVTHYETLEAFQEATLLKIHLETGRTHQIRVHFSALHHPCCGDPMYGSDPALSERLGLNRQWLHAVSLGFNHPADGRWMEIVSPYPTDLQHALDVLREQ

SEQ ID NO: 395 - DNA, 2647 bp, Corynebacterium glutamicum
  CDS (101)..(2647): RXA01344
gggggatcgggttcctcagcagaccaattgctcaaaaataccagcggtgttgatctgcacttaatggccttgaccagccaggtgcaattacccgcgtgaggtgctggaaggacccatcttggcagtctcccgccagaccaagtcagtcgtcgatattcccggtgcaccgcagcgttattctttcgcgaaggtgtccgcacccattgaggtgcccgggctactagatcttcaactggattcttactcctggctgattggtacgcctgagtggcgtgctcgtcagaaggaagaattcggcgagggagcccgcgtaaccagcggccttgagaacattctcgaggagctctccccaatccaggattactctggaaacatgtccctgagcctttcggagccacgcttcgaagacgtcaagaacaccattgacgaggcgaaagaaaaggacatcaactacgcggcgccactgtatgtgaccgcggagttcgtcaacaacaccaccggtgaaatcaagtctcagactgtcttcatcggcgatttcccaatgatgacggacaagggaacgttcatcatcaacggaaccgaacgcgttgtggtcagccagctcgtccgctccccgggcgtgtactttgaccagaccatcgataagtcaactgagcgtccactgcacgccgtgaaggttattccttcccgtggtgcttggcttgagtttgacgtcgataagcgcgattcggttggtgttcgtattgaccgcaagcgtcgccagccagtcaccgtactgctgaaggctcttggctggaccactgagcagatcaccgagcgtttcggtttctctgaaatcatgatgtccaccctcgagtccgatggtgtagcaaacaccgatgaggcattgctggagatctaccgcaagcagcgtccaggcgagcagcctacccgcgaccttgcgcagtccctcctggacaacagcttcttccgtgcaaagcgctacgacctggctcgcgttggtcgttacaagatcaaccgcaagctcggccttggtggcgaccacgatggtttgatgactcttactgaagaggacatcgcaaccaccatcgagtacctggtgcgtctgcacgcaggtgagcgcgtcatgacttctccaaatggtgaagagatcccagtcgagaccgatgacatcgaccactttggtaaccgtcgtctgcgtaccgttggcgaactgatccagaaccaggtccgtgtcggcctgtcccgcatggagcgcgttgttcgtgagcgtatgaccacccaggatgcggagtccattactcctacttccttgatcaacgttcgtcctgtctctgcagctatccgtgagttcttcggaacttcccagctgtctcagttcatggaccagaacaactccctgtctggtttgactcacaagcgtcgtctgtcggctctgggcccgggtggtctgtcccgtgagcgcgccggcatcgaggttcgagacgttcacccatctcactacggccgtatgtgcccaattgagactccggaaggtccaaacattggcctgatcggttccttggcttcctatgctcgagtgaacccattcggtttcattgagaccccataccgtcgcatcatcgacggcaagctgaccgaccagattgactaccttaccgctgatgaggaagaccgcttcgttgttgcgcaggcaaacacgcactacgacgaagagggcaacatcaccgatgagaccgtcactgttcgtctgaaggacggcgacatcgccatggttggccgcaacgcggttgattacatggacgtttcccctcgtcagatggtttctgttggtaccgcgatgattccattcctggagcacgacgatgctaaccgtgcactgatgggcgcgaacatgcagaagcaggctgtgccactgattcgtgccgaggctcctttcgtgggcaccggtatggagcagcgcgcagcatacgacgccggcgacctggttattaccccagtcgcaggtgtggtggaaaacgtttcagctgacttcatcaccatcatggctgatgacggcaagcgcgaaacctacctgctgcgtaagttccagcgcaccaaccagggcaccagctacaaccagaagcctttggttaacttgggcgagcgcgttgaagctggccaggttattgctgatggtccaggtaccttcaatggtgaaatgtcccttggccgtaaccttctggttgcgttcatgccttgggaaggccacaactacgaggatgcgatcatcctcaaccagaacatcgttgagcaggacatcttgacctcgatccacatcgaggagcacgagatcgatgcccgcgacactaagcttggcgccgaagaaatcacccgcgacatccctaatgtgtctgaagaagtcctcaaggacctcgacgaccgcggtattgtccgcatcggtgctgatgttcgtgacggcgacatcctggtcggtaaggtcacccctaagggcgagaccgagctcaccccggaagagcgcttgctgcgcgcaatcttcggtgagaaggcccgcgaagttcgcgatacctccatgaaggtgcctcacggtgagaccggcaaggtcatcggcgtgcgtcacttctcccgcgaggacgacgacgatctg

SEQ ID NO: 396 - protein, 849 aa, Corynebacterium glutamicum
VLEGPILAVSRQTKSVVDIPGAPQRYSFAKVSAPIEVPGLLDLQLDSYSWLIGTPEWRARQKEEFGEGARVTSGLENILEELSPIQDYSGNMSLSLSEPRFEDVKNTIDEAKEKDINYAAPLYVTAEFVNNTTGEIKSQTVFIGDFPMMTDKGTFIINGTERVVVSQLVRSPGVYFDQTIDKSTERPLHAVKVIPSRGAWLEFDVDKRDSVGVRIDRKRRQPVTVLLKALGWTTEQITERFGFSEIMMSTLESDGVANTDEALLEIYRKQRPGEQPTRDLAQSLLDNSFFRAKRYDLARVGRYKINRKLGLGGDHDGLMTLTEEDIATTIEYLVRLHAGERVMTSPNGEEIPVETDDIDHFGNRRLRTVGELIQNQVRVGLSRMERVVRERMTTQDAESITPTSLINVRPVSAAIREFFGTSQLSQFMDQNNSLSGLTHKRRLSALGPGGLSRERAGIEVRDVHPSHYGRMCPIETPEGPNIGLIGSLASYARVNPFGFIETPYRRIIDGKLTDQIDYLTADEEDRFVVAQANTHYDEEGNITDETVTVRLKDGDIAMVGRNAVDYMDVSPRQMVSVGTAMIPFLEHDDANRALMGANMQKQAVPLIRAEAPFVGTGMEQRAAYDAGDLVITPVAGVVENVSADFITIMADDGKRETYLLRKFQRTNQGTSYNQKPLVNLGERVEAGQVIADGPGTFNGEMSLGRNLLVAFMPWEGHNYEDAIILNQNIVEQDILTSIHIEEHEIDARDTKLGAEEITRDIPNVSEEVLKDLDDRGIVRIGADVRDGDILVGKVTPKGETELTPEERLLRAIFGEKAREVRDTSMKVPHGETGKVIGVRHFSREDDDDL

SEQ ID NO: 397 - DNA, 469 bp, Corynebacterium glutamicum
  CDS (101)..(469): RXA01387
acgccgacaccgcatagcagatcagaaaacaaccgctagaaatcaagccatacatcccccggacattgaagagatgttctggggggaaagggagttttacgtgctcgacgtaaacgtcttcgatgagctccgcatcggcctggccaccgccgacgacatccgccgttggtccaagggtgaggtcaagaagccggagaccatcaactaccgaaccctcaagcctgagaaggacggtctgttctgcgagcgtatcttcggtccaactcgcgactgggagtgcgcctgcggtaagtacaagcgtgtccgctacaagggcatcatctgtgaacgctgtggcgttgaggtcaccaagtccaaggtgcgccgtgagcgcatgggacacattgagctcgctgcaccagtaacccacatttggtacttcaagggcgttccatcacgcctcggctaccttttggaccttgctccaaag

SEQ ID NO: 398 - protein, 123 aa, Corynebacterium glutamicum
VLDVNVFDELRIGLATADDIRRWSKGEVKKPETINYRTLKPEKDGLFCERIFGPTRDWECACGKYKRVRYKGIICERCGVEVTKSKVRRERMGHIELAAPVTHIWYFKGVPSRLGYLLDLAPK

SEQ ID NO: 399 - DNA, 255 bp, Corynebacterium glutamicum
  CDS (101)..(232): RXA01388
  All occurrences of n = any nucleotide
nnnnnnnntnnnnnnnnnnnnnnnnaannnnnnntgcatcccggatccaggtattcctgagtccttgaaggttctcctcaaggagctccagtccttgtgcatgaacgaggaggttctctccgcaaacggcactccaatgaagctcgcgggtgacgacgacgacttcgatcaggcaggcgcctcaattggcatcaacctgtcccgtgacgagcgttccgacgccgacaccgcatagcagatcagaaaacaaccgct

SEQ ID NO: 400 - protein, 44 aa, Corynebacterium glutamicum
MNEEVLSANGTPMKLAGDDDDFDQAGASIGINLSRDERSDADTA

SEQ ID NO: 401 - DNA, 1316 bp, Corynebacterium glutamicum
  CDS (1)..(1293): RXA01283
acccgccagggtgttcgcgttcctgtcgctgctgaggttctggatgcaactggtgctgtcaccggctacacccgccatgacctgatcgagacttctgtctccggtcgtgttctggctggcgatgcaaccaacgctgcaggcgaggttgtgcttgctgctggtaccgacctgaccgagctcaacattgaccttctggtcgaggctggcatcaaggacgtcaaggttcgttccgtacttacctgccagaccccaaccggtgtttgtgctaagtgctacggcaagtccatggcttccggccagcaggttgatatcggagaggctgtcggtattgttgctgcacagtccattggtgagcctggtacccagctgaccatgcgtaccttccaccagggtggtgtcggtggcgatattaccggcggtctgcctcgtgttcaggagctgtttgaggcacgtgttcctaagaactgtgcaccaattgcttctgttgaaggtgttatccaccttgaggatgaaggcaacttctacactctgaccatcgttcctgacgatggctccgacaacgttgtctacgagaagctgtccaagcgacagggtcttgcatccactcgcgtggctatggagtccaacgctggtgcgttcattgagcgcaccttgaccgaaggtgaccgcgtcaccgttggtcagcgtctgctccgtggtgcagctgatccacacgacgtgctcgagatcctcggtcgccgcggtgtggagcagcacctcatctatgaggtgcaggctgtttaccgtgcacagggtgtggccatccacgacaagcacatcgaaatcatcattcgtcagatgctgcgtcgcggtaccgtcattgagtccggttccaccgagttccttcctggttctttggttgacctctctgaggcgaagctggctaactctgaggcaatcggtgcgggcggtcagcctgcagagctgcgttctgagatcatgggtatcaccaaggcctctctcgcaactgagtcttggctgtctgcagcgtccttccaggagaccactcgtgtcctgactgatgctgctatcaacaagcgctccgataagctcatcggcctgaaggagaacgtgatcatcggtaagctgatcccagctggtactggtatttcccgttaccgcaacatctccatcaagccaaccgaggctgctcgcaacgccgcatactcgatcccaacttatggtgagtcgatttacggtgacgatggattcggtgagttcaccggcgcatccgtcccattggatgaggctttctagagcaaggaaaccttaaatcc

SEQ ID NO: 402 - protein, 431 aa, Corynebacterium glutamicum
TRQGVRVPVAAEVLDATGAVTGYTRHDLIETSVSGRVLAGDATNAAGEVVLAAGTDLTELNIDLLVEAGIKDVKVRSVLTCQTPTGVCAKCYGKSMASGQQVDIGEAVGIVAAQSIGEPGTQLTMRTFHQGGVGGDITGGLPRVQELFEARVPKNCAPIASVEGVIHLEDEGNFYTLTIVPDDGSDNVVYEKLSKRQGLASTRVAMESNAGAFIERTLTEGDRVTVGQRLLRGAADPHDVLEILGRRGVEQHLIYEVQAVYRAQGVAIHDKHIEIIIRQMLRRGTVIESGSTEFLPGSLVDLSEAKLANSEAIGAGGQPAELRSEIMGITKASLATESWLSAASFQETTRVLTDAAINKRSDKLIGLKENVIIGKLIPAGTGISRYRNISIKPTEAARNAAYSIPTYGESIYGDDGFGEFTGASVPLDEAF

SEQ ID NO: 403 - DNA, 726 bp, Corynebacterium glutamicum
  CDS (101)..(703): RXA01433
cacttgagtgggcgccgagaagtatctctcaatggaaaatctgcccatactaagccgcataagggatacggggtgtgtccctcaacctgcgggggatcttatgacagtactgcctaaaaaccatgacctaagcgatacccaactcgtcaaacagtttatatctggcgactccagggcattttccaccatcattcaccgccacgaacgacatatgatgcaggcagccagaaaatacgggcggaaaccagaagacgcccaagacattctccaagaagctctctttcgcgccagccgaaacatgcacctttatagagcagaagcagctctcggcacgtggctccacaaacttgtcctgaatagcggcttcgattgggctacccaccgctcccaagtagaattccccatccttaacgaaccaacaatcgatttagaaaaagatcctcgcctagccaccgaccccttgggctacctcgatgtcgccatgacaattcgatccgccatcgaccaattacaccccgatcaacgcatcgccttaatacttgtcgacctcggcggctacaccgtagaagatgtggccgaaatcgaaggaatcaaagtaggtaccgttaaatcacgccgagggcgcgcacgcaaagcgttgcgcgcccttttacatgcagatttcttcgggcccgaagatggctccatacagtgcgaaagcaactgatggaagtttttcaaagtgtc

SEQ ID NO: 404 - protein, 201 aa, Corynebacterium glutamicum
MTVLPKNHDLSDTQLVKQFISGDSRAFSTIIHRHERHMMQAARKYGRKPEDAQDILQEALFRASRNMHLYRAEAALGTWLHKLVLNSGFDWATHRSQVEFPILNEPTIDLEKDPRLATDPLGYLDVAMTIRSAIDQLHPDQRIALILVDLGGYTVEDVAEIEGIKVGTVKSRRGRARKALRALLHADFFGPEDGSIQCESN

SEQ ID NO: 405 - DNA, 741 bp, Corynebacterium glutamicum
  CDS (101)..(718): RXA02456
aaagtctaagcaacagctcacgtggctttacagctacccccgaaaggtctgttttttatcggaagtagaatagtcggcacgcattttcgaaaggggccacatggctgaaaaccgaaccggcacagtcgatggagacgcgttggctgcccgctttgaagaggaggcactgccactccttgaccagctctatggcggtgctctgcgcatgactagaaatcccgcagatgcggaagatctcgtgcaagacacctatatcaaggcgtaccaggcgttcgcgagcttcaaaccaggcaccaacctgaaggcttggctctatcggatcatgacgaatacctacatcaacatgtaccgaaagaaacagaggcagccatcgcaaacctctgccgatgagatcactgactaccagctcgttgaatctcaatcgcatacctcaacagggctggaatccgccgaggttgaggctctgaaaaatctgccagacggaaaaattggcgatgcaatgaatcaactcagcccggaataccggatggtggtttattatgccgatgtagaagatctcgcatacaaagaaatcgccgagatcatggacgttccactcggaactgtgatgtcccgactccatcgtggaagaaaacagctccgaggaatgttaaaggaagtagcgaaggaacaaggcattggtcttgaacatcccgacatgaagaaaaattcggaggcataacgatgacgaatctcaaccgc

SEQ ID NO: 406 - protein, 206 aa, Corynebacterium glutamicum
MAENRTGTVDGDALAARFEEEALPLLDQLYGGALRMTRNPADAEDLVQDTYIKAYQAFASFKPGTNLKAWLYRIMTNTYINMYRKKQRQPSQTSADEITDYQLVESQSHTSTGLESAEVEALKNLPDGKIGDAMNQLSPEYRMVVYYADVEDLAYKEIAEIMDVPLGTVMSRLHRGRKQLRGMLKEVAKEQGIGLEHPDMKKNSEA

SEQ ID NO: 407 - DNA, 793 bp, Corynebacterium glutamicum
  CDS (101)..(793): RXA00304
ccccaatgtgggggtgttaagaactccataaaagcgcttgggaactttttgtggaagcagtccgttgaacctcttgaaccgcgaatttaggaggccagttatgacagcaccgtccacgcaggatctcgcaacgactgaacgtgaggtagatcccggcagcagaaggggccaaaccaacgacaatccctcgcaggaccttgttcgcgtttacctcaacggcatcggcaaaactgccttgcttaccgcggaggatgaagttgagctcgcacagaccattgaggttggcctttatgcagagcaccttctgaaaaactctgaagagccactcacccgcgccatgaagcgcgatctaaaggttcttgccaaggacggcaagaaggctcgttcccacctcctcgaggcaaacctgcgcctggtggtgtcccttgctaagcgctacaccggccgcggcatgccactgctggatcttatccaggagggcaacctcggactgatccgcgcgatggaaaagtttgattactccaagggctttaagttctccacctacgcaacctggtggatccgccaggcaatcacccgcggcatggcagatcagtcccgcaccatccgcctcccagtccaccttgtggagcaggtgaacaagctttcccgcatcaagcgcgagttgtaccagcacttgggccgtgaagccaccaatgaggaactcgcagaagagtccggcattgaagagtccaagattgaaatgctgcttcgtcagtctcgcgatccagtgagcttggacatgccagtcggc

SEQ ID NO: 408 - protein, 231 aa, Corynebacterium glutamicum
MTAPSTQDLATTEREVDPGSRRGQTNDNPSQDLVRVYLNGIGKTALLTAEDEVELAQTIEVGLYAEHLLKNSEEPLTRAMKRDLKVLAKDGKKARSHLLEANLRLVVSLAKRYTGRGMPLLDLIQEGNLGLIRAMEKFDYSKGFKFSTYATWWIRQAITRGMADQSRTIRLPVHLVEQVNKLSRIKRELYQHLGREATNEELAEESGIEESKIEMLLRQSRDPVSLDMPVG

SEQ ID NO: 409 - DNA, 687 bp, Corynebacterium glutamicum
  CDS (101)..(664): RXA00495
aaatccaactgggtgaattacccctgcataaatgcatgagggctttatacttgtcttattattaaacttttagggttttgatgcaggaaggtgcgagaacttggctgatactgagcgcgagctcgctgacctggtaccgcaggcaacggcgggcgatcgtcgggcattgcaaagaataatggagattattcaccccattgttttgcgttatgctcgcgctcgtattggaggtggacgccagccaacggcagaagacgttgctcaagaaatctgcctggcggtagccacctccattaggaactttgtcgaccagggtaggccgttcatggcgtttgtctacggcattgcatctaacaaggtcgcagatgctcacagggcgatgtcgagggataaatcgactcctattgaggaagtcccagaaacttcaccagatacttttacccccgaagactttgcgctggtcagcgatggaagtaacagagttagggaacttctcgatctactgagtgaaaaggcacgcgacattcttatcttgagagttatcgttggtctttccgcagaagaaactgcagagatggtgggcagcaccccaggtgctgtacgagttgcccaacacagggcactcacgacacttcgaagcacacttgagcagcaggagaacaagtaatgactcgacgtctacatggt

SEQ ID NO: 410 - protein, 188 aa, Corynebacterium glutamicum
LADTERELADLVPQATAGDRRALQRIMEIIHPIVLRYARARIGGGRQPTAEDVAQEICLAVATSIRNFVDQGRPFMAFVYGIASNKVADAHRAMSRDKSTPIEEVPETSPDTFTPEDFALVSDGSNRVRELLDLLSEKARDILILRVIVGLSAEETAEMVGSTPGAVRVAQHRALTTLRSTLEQQENK

SEQ ID NO: 411 - DNA, 608 bp, Corynebacterium glutamicum
  CDS (1)..(585): RXA00532
gcaattgtgaagtcaaaagagcgtaacgacgcccacgtcaccgagctggccctagccgccggccgtggcgaccgcgcagctctcaccgatttcatccgggaaacccaagacgatgtctggcgtctcctcgcccaccttggcggccacgaaatcgccgacgatctaacccaagaaacttatctgcgggtcatgagcgccctcccccgcttcgcagcgcgctcctcggcgcgcacctggctactatcgctagcccggcgcgtctgggtcgacaacatccgacacgacatggcacgcccccgcaaatccatcgtcgaatacgaagacaccggtgccaccgacgcgagcaacgcaggcatctggtccgagtggatcgacgtgcgcacgcttatcgacgccctcccacccgaacgccgcgaagccctcatcctcacccaagtgttgggctacacctacgaagaagccgcaaaaatcgccgacgtccgagtcggaacaatccgttcccgcgtagcccgcgccagagcggacctcattgctgcaacagctaccggtgattcctcagccgaagatggcaaatccgcccaaggttagcagatgagctacgtcaacgg

SEQ ID NO: 412 - protein, 195 aa, Corynebacterium glutamicum
AIVKSKERNDAHVTELALAAGRGDRAALTDFIRETQDDVWRLLAHLGGHEIADDLTQETYLRVMSALPRFAARSSARTWLLSLARRVWVDNIRHDMARPRKSIVEYEDTGATDASNAGIWSEWIDVRTLIDALPPERREALILTQVLGYTYEEAAKIADVRVGTIRSRVARARADLIAATATGDSSAEDGKSAQG

SEQ ID NO: 413 - DNA, 765 bp, Corynebacterium glutamicum
  CDS (101)..(742): RXA01530
cgcgccatcgctcgtgacggccgcaaggcgaaaaaccacctcctggaagccaaccttcgtctggttgtctccctggcaaagacgctacaccggccgtggcatggcattcctggacctcatccaggaaggcaacctcggtctgattcgtgccgtagagaagttcgactactccaagggctacaagttctccacctacgcaacctggtggatccgtcaggcaatcacccgcgccatggccgaccaagcacgaaccatccgtatcccagtccacatggttgaagtgatcaacaaacttggtcgcatccaacgtgaactccttcaggaactcggccgcgaaccaaccccacaggaactgtccaaagaaatggacatctccgaggaaaaggtactggaaatccagcagtacgcccgcgaaccaatctccctggaccaaaccatcggcgacgaaggcgacagccagctcggcgacttcatcgaagactccgaagccgtcgtcgcagtcgacgccgtctcattcaccctgctgcaagaccagctacaggacgtcctagagaccctctccgaacgtgaagccggcgtggttaaactccgcttcggactcaccgacggaatgccacgcactttagacgaaatcggccaagtttacggtgtcacccgtgagcgcatccgccagattgagtccaagaccatgtctaagctgcgccacccatcacgctcccaggtccttcgcgactacctggactaaaaccccagtcgggctcaaga

SEQ ID NO: 414 - protein, 214 aa, Corynebacterium glutamicum
MAFLDLIQEGNLGLIRAVEKFDYSKGYKFSTYATWWIRQAITRAMADQARTIRIPVHMVEVINKLGRIQRELLQELGREPTPQELSKEMDISEEKVLEIQQYAREPISLDQTIGDEGDSQLGDFIEDSEAVVAVDAVSFTLLQDQLQDVLETLSEREAGVVKLRFGLTDGMPRTLDEIGQVYGVTRERIRQIESKTMSKLRHPSRSQVLRDYLD

SEQ ID NO: 415 - DNA, 1140 bp, Corynebacterium glutamicum
  CDS (101)..(1117): RXA01531
taggcggaaagggcgttaagtacttgccatttaatcctcagcatcactcggatcagtcggagatgtcgatgaaaatgcaccaggagccgtggagagcagcatggtagaaaacaacgtagcaaaaaagacggtcgctaaaaagaccgcacgcaagaccgcacgcaaagcagccccgcgcgtggcaaccccattgggagtcgcatctgagtctcccatttcggccacccctgcgcgcagcatcgatggaacctcaacccctgttgaagctgctgacaccatagagaccaccgcccctgcagcgaaggctcctgcggccaaggctcccgctaaaaaggttgccaagaagacagctcgcaaggcacctgcgaaaaagactgtcgccaagaaagccacaaccgccaaggctgcacctgcaactgccaaggacgaaaacgcacctgttgatgacgacgaggagaacctcgctcaggatgaacaggacttcgacggcgatgacttcgtagacggcatcgaagacgaagaagatgaagacggcgtcgaagccctcggtgaagaaagcgaagacgacgaagaggacggctcatccgtttgggatgaagacgaatccgcaaccctgcgtcaggcacgtaaagatgccgagctcaccgcttccgccgactctgttcgcgcttacctgaagcaaatcggtaaagttgccctgctgaacgctgaacaggaagtctccctggcaaagcgcatcgaagcaggcctttacgccacccaccgcatggaggaaatggaagaagctttcgcagccggtgacaaggacgcgaaactcaccccagccgtcaagcgtgacctccgcgccatcgctcgtgacggccgcaaggcgaaaaaccacctcctggaagccaaccttcgtctggttgtctccctggcaaagacgctacaccggccgtggcatggcattcctggacctcatccaggaaggcaacctcggtctgattcgtgccgtagagaagttcgactactccaagggctacaagttctccacctacgcaacctggtggatccgtcaggcaatcacccgcgccatggccgaccaagcacgaaccatccgtatcccagtccacatggttgaagtgatcaacaaacttggtc

SEQ ID NO: 416 - protein, 339 aa, Corynebacterium glutamicum
MVENNVAKKTVAKKTARKTARKAAPRVATPLGVASESPISATPARSIDGTSTPVEAADTIETTAPAAKAPAAKAPAKKVAKKTARKAPAKKTVAKKATTAKAAPATAKDENAPVDDDEENLAQDEQDFDGDDFVDGIEDEEDEDGVEALGEESEDDEEDGSSVWDEDESATLRQARKDAELTASADSVRAYLKQIGKVALLNAEQEVSLAKRIEAGLYATHRMEEMEEAFAAGDKDAKLTPAVKRDLRAIARDGRKAKNHLLEANLRLVVSLAKTLHRPWHGIPGPHPGRQPRSDSCRREVRLLQGLQVLHLRNLVDPSGNHPRHGRPSTNHPYPSPHG

SEQ ID NO: 417 - DNA, 771 bp, Corynebacterium glutamicum
  CDS (101)..(748): RXA02065
cgagatgtgaagtacctacacgcattaagtgcaaatgaattcacaattgccagaagatgcacaggatgtaatctagatttcccaagttcagtggggcaaaatgacttatatgaaaaagaagtcccgagatgacgcacccgtcgtaatcgaaaccgttcaagcagaacatgctgaagaactcacgggcactgcagcattcgatgctggacaggcagacatgccaacatggggcgagctagtcgcagaacatgcagatagcgtttaccgcctcgcgtaccgtctttccggcaaccagcacgatgctgaagacctgacccaagaaacattcatgcgtgtcttccgctcgttgaagagctaccagccaggcacctttgagggctggctgcaccgcatcaccaccaacttgttccttgatatggttcgccaccgcggcaagatccgcatggaggcgctgcctgaagattatgagcgcgttccgggcaatgacatcaccccagagcaggcatacaccgaagctaaccttgacccagctctgcaggcagccctcgatgagttgagcccagacttccgcgtggcagtgatcctctgtgatgttgttggtatgagctatgacgaaatcgcagagaccctcggagtgaaaatgggtaccgtgcgttcccgtattcaccgtggacgcagccagcttcgtgcaagtttggaagctgcagcaatgaccagcgaggaagtttctttgttggttccaacccactaaagttggtgtgttttctgaca

SEQ ID NO: 418 - protein, 216 aa, Corynebacterium glutamicum
MTYMKKKSRDDAPVVIETVQAEHAEELTGTAAFDAGQADMPTWGELVAEHADSVYRLAYRLSGNQHDAEDLTQETFMRVFRSLKSYQPGTFEGWLHRITTNLFLDMVRHRGKIRMEALPEDYERVPGNDITPEQAYTEANLDPALQAALDELSPDFRVAVILCDVVGMSYDEIAETLGVKMGTVRSRIHRGRSQLRASLEAAAMTSEEVSLLVPTH

SEQ ID NO: 419 - DNA, 645 bp, Corynebacterium glutamicum
  CDS (101)..(622): RXA00588
tcatacatcttggccccggaaaaccggggccaatcttatggctcaagtcgctagttagccgatgatccacctctactgttccccaggagggtaagtaattatggcaagtgtagataagcaatacatcaccccagaaaccaaggccaagctggaggaagagctcaacgccctcatcgcacaccgccctgcagttgctgcggaaatcaatgagcgccgtgaagaaggcgacctcaaggaaaacgctggctatgacgccgctcgtgaaatgcaggaccaggaagaggcccgcatcaagcagatctatgagctgctggccaactccaccactgagcgcgaaggcatcatcgaaggtgtcgcaaacgttggctccgttgttcacgtctactacgacggcgacgagaacgacaaggaaaccttcctcatcggtacccgtgctggcgcttccgagaacccagatcttgagacctactctgagcagtccccactcggcgctgcaattctcggagctcaggaaggcgacacccgtcagtacaccgctccaaatggttccgttatctccgtaactgttgtttctgcagaaccatacaactcagcaaaagccgcgacactccgcggcaaaaactaaccaaggatttaaaagtcttc

SEQ ID NO: 420 - protein, 174 aa, Corynebacterium glutamicum
MASVDKQYITPETKAKLEEELNALIAHRPAVAAEINERREEGDLKENAGYDAAREMQDQEEARIKQIYELLANSTTEREGIIEGVANVGSVVHVYYDGDENDKETFLIGTRAGASENPDLETYSEQSPLGAAILGAQEGDTRQYTAPNGSVISVTVVSAEPYNSAKAATLRGKN

SEQ ID NO: 421 - DNA, 1343 bp, Corynebacterium glutamicum
  CDS (1)..(1320): RXN01724
cgtgcgacacagccttccgcaccggttgagcaagcacaagaagctcccgcgcaaacttcaactgcacctgcttcagcaccatctgaagagactcccgcagctcccgctcgtcgtggacgtcgccgtgtaaccaccaccgcgaccaccccagagccagcagcgcctgcacaatcccagcctgcagaagctcaaccagcacagactcaggctgcacagcaagaagaacttcctgttgcagcgaaggagtccgcaccagctacagaaaacactcagggccaagctcagggccaagctcagggccaagctcagggcgatgagcacgatgatcgttttgagtcccgttctgctgcacgccgagcacgccgcaaccgtcagcgccagatccaccgcgatggcgatgacaatgcgaatgcaaacacagagtctgagcagaacacccctgcccagaacgcaaccgcacaggctgagtctgagcagactgcagctcctgcacaggctgaagcagctgagcagaaccagaacgataacagcgagtcctccgagaaccgcagcgataactaccgcaacaacaatcgtcgttcccgcaacaaccggaacaatcgcaattaccgcgataacaacgagtcctctgataatgcaggacagtccagcaatgatgatgccgacaacaatcaggcacggtctgaggacaataacgacgatcgccgttctcgtaataaccgtaacaacgaccgcaatgatcgtaacgatcgcaatgaccgcgacaacgacgacaacgatgatcgccgcaaccgtcgcggacgccgcaatcgccgtggacgcaacgaccgtaacgatcgcgacaaccgagataaccgggataaccgcgacaacagcaacgatggcgacaacaaccagcaagatgagctgcagcaggtagcaggcatcctggacatcgtggaccataacgtcgcattcgtgcgcaccaccggttaccacgctgcaccttctgacgtgtttgtcagcaaccagctgatccgccgtatgggtcttcgttccggtgacgccattgaaggtcaggttcgtatgaaccagggtggtggcaaccacaacaaccatggtcgcaaccgtcagaagtacaacaacttggtgcgcgtggagatggttaacggtcttcctgctgaagagactcgcaaccgtcctgagttcggcaagctgactcctctgtacccgaaccagcgtctgcgtttggaaactgagcagaagattcttaccactcgtgtgatcgacttgatcatgcctattggtaagggacagctgtgctttgattgtgtcgccacctaaggctggtaagaccacgatcc

SEQ ID NO: 422 - protein, 440 aa, Corynebacterium glutamicum
RATQPSAPVEQAQEAPAQTSTAPASAPSEETPAAPARRGRRRVTTTATTPEPAAPAQSQPAEAQPAQTQAAQQEELPVAAKESAPATENTQGQAQGQAQGQAQGDEHDDRFESRSAARRARRNRQRQIHRDGDDNANANTESEQNTPAQNATAQAESEQTAAPAQAEAAEQNQNDNSESSENRSDNYRNNNRRSRNNRNNRNYRDNNESSDNAGQSSNDDADNNQARSEDNNDDRRSRNNRNNDRNDRNDRNDRDNDDNDDRRNRRGRRNRRGRNDRNDRDNRDNRDNRDNSNDGDNNQQDELQQVAGILDIVDHNVAFVRTTGYHAAPSDVFVSNQLIRRMGLRSGDAIEGQVRMNQGGGNHNNHGRNRQKYNNLVRVEMVNGLPAEETRNRPEFGKLTPLYPNQRLRLETEQKILTTRVIDLIMPIGKGQLCFDCVAT

SEQ ID NO: 423 - DNA, 960 bp, Corynebacterium glutamicum
  CDS (101)..(937): FRXA01723
  All occurrences of Xaa = any amino acid
  All occurrences of n = any nucleotide
ccttccgcaccggttgagcaagcacaagaagctcccgcgcaaacttcaactgcacctgcttcagcaccatctgaagagactcccgcagctcccgctcgtcgtggacktcagccgtgtaaccaccaccgcgaccaccccagagccagcagcgcctgcacaatcccagcctgcagaagctcaaccagcacagactcaggctgcacagcaagaagaacttcctgttgcagcgaaggagtccgcaccagctacagaaaacactcagggccaakcycagggccaagctcagggcsaagctcagggcgatgagcacgatgatcgytttgagtcccgttctgctgcacgccgagcacgccgcaaccgtcagcgccagatccaccgcgatggcgatgacaatgcgaatgcaaacacagagtctgagcagaacacccctgcccagaacgcaaccgcacaggctgagtctgagcagactgcagctcctgcacaggctgaagcagctgagcagaaccagaacgataacagcgagtcctccgagaaccgcagcgataactaccgcaacaacaatcgtcgttcccgcaacaaccggaacaatcgcaattaccgcgataacaacgagtcctctgataatgcaggacagtccagcaatgatgatgccgacaacaatcaggcacggtctgaggacaataacgacgatcgccgttctcgtaataaccgtaacaacgaccgcaatgatcgtaacgatcgcaatgaccgcgacaacgacgacaacgatgatcgccgcaaccgtcgcggacgccgcaatcgccgtggancngcaacgaccgtaacgatcgcgacaaccgagataaccgggataaccgcgacaacagcaacgatggcgacaacaaccagcaagatngagnctgcagcaggtagcaggcatcctggacatcgtggaccataacgtcgcattcgtgcgcacca

SEQ ID NO: 424 - protein, 279 aa, Corynebacterium glutamicum
  All occurrences of Xaa = any amino acid
VDXSRVTTTATTPEPAAPAQSQPAEAQPAQTQAAQQEELPVAAKESAPATENTQGQXQGQAQGXAQGDEHDDXFESRSAARRARRNRQRQIHRDGDDNANANTESEQNTPAQNATAQAESEQTAAPAQAEAAEQNQNDNSESSENRSDNYRNNNRRSRNNRNNRNYRDNNESSDNAGQSSNDDADNNQARSEDNNDDRRSRNNRNNDRNDRNDRNDRDNDDNDDRRNRRGRRNRRGXATTVTIATTEITGITATTATMATTTSKXEXAAGSRHPGHRGP

SEQ ID NO: 425 - DNA, 507 bp, Corynebacterium glutamicum
  CDS (101)..(484): FRXA01724
gcgacaaccgagataaccgggataaccgcgacaacagcaacgatggcgacaacaaccagcaagatngagnctgcagcaggtagcaggcatcctggacatcgtggaccataacgtcgcattcgtgcgcaccaccggttaccacgctgcaccttctgacgtgtttgtcagcaaccagctgatccgccgtatgggtcttcgttccggtgacgccattgaaggtcaggttcgtatgaaccagggtggtggcaaccacaacaaccatggtcgcaaccgtcagaagtacaacaacttggtgcgcgtggagatggttaacggtcttcctgctgaagagactcgcaaccgtcctgagttcggcaagctgactcctctgtacccgaaccagcgtctgcgtttggaaactgagcagaagattcttaccactcgtgtgatcgacttgatcatgcctattggtaagggacagctgtgctttgattgtgtcgccacctaaggctggtaagaccacgatcc

SEQ ID NO: 426 - protein, 128 aa, Corynebacterium glutamicum
VDHNVAFVRTTGYHAAPSDVFVSNQLIRRMGLRSGDAIEGQVRMNQGGGNHNNHGRNRQKYNNLVRVEMVNGLPAEETRNRPEFGKLTPLYPNQRLRLETEQKILTTRVIDLIMPIGKGQLCFDCVAT

SEQ ID NO: 427 - DNA, 330 bp, Corynebacterium glutamicum
  CDS (101)..(307): RXN01725
ctgtacccgaaccagcgtctgcgtttggaaactgagcagaagattcttaccactcgtgtgatcgacttgatcatgcctattggtaagggacagctgtgctttgattgtgtcgccacctaaggctggtaagaccacgatcctgcagaacattgcgaacgctatttccaccaacaacccagagtgctacctcatggttgttttggttgatgagcgtccgaaagaagttactgatatgcagcgctccgtcaacggcgaagtgatttcttctactttcgatcgtccaccatcagagcacactgcggttgcttgagctggcgattgagcgtgcga

SEQ ID NO: 428 - protein, 69 aa, Corynebacterium glutamicum
LIVSPPKAGKTTILQNIANAISTNNPECYLMVVLVDERPKEVTDMQRSVNGEVISSTFDRPPSEHTAVA

SEQ ID NO: 429 - DNA, 231 bp, Corynebacterium glutamicum
  CDS (101)..(208): FRXA01725
tgattgtgtcgccacctaaggctggtaagaccacgatcctgcagaaacattgcgaacgctatttccaccaacaacccagagtgctacctcatggcttgttttggttgatgagcgtccgaaagaagttactgatatgcagcgctccgtcaacggcgaagtgatttcttctactttcgatcgtccaccatcagagcacactgcggttgcttgagctggcgattgagcgtgcga

SEQ ID NO: 430 - protein, 36 aa, Corynebacterium glutamicum
LVDERPKEVTDMQRSVNGEVISSTFDRPPSEHTAVA

SEQ ID NO: 431 - DNA, 696 bp, Corynebacterium glutamicum
  CDS (101)..(673): RXA01726
gttgatgagcgtccgaaagaagttactgatatgcagcgctccgtcaacggcgaagtgatttcttctactttcgatcgtccaccatcagagcacactgcggttgcttgagctggcgattgagcgtgcgaagcgcctggtggagcagggccaggacgtcgttgttctgcttgactccattactcgtttgggccgtgcgtacaacaacagctcacctgcatcgggacgtattttgtccggtggtgtggattccaatgcactgtacccgccgaagcgtttcttgggtgctgctcgaaacatcgaaaatggtggatctttgaccatcatcgcaactgccatggtggaaaccggctctgctggtgacaccgtgatcttcgaggagttcaagggcactggtaacgctgagctgaagctggatcgtaagatctctgagcgccgcgttttcccagctgtggatgttaatccttctggtactcgtaaggacgagctgttgctcaacccggacgaggctcgcattatgcacaagctgcgtcgtattctgtctgcacttgataatcagcaagccattgatctgttgatcaagcagctgaagaagaccaagtccaatgcggaattcctcatgcaggttgcttccagcgctccaatggcaggcacagaaaaagaggaggattactcctaatggcatcgcaggtttctgca

SEQ ID NO: 432 - protein, 191 aa, Corynebacterium glutamicum
LLELAIERAKRLVEQGQDVVVLLDSITRLGRAYNNSSPASGRILSGGVDSNALYPPKRFLGAARNIENGGSLTIIATAMVETGSAGDTVIFEEFKGTGNAELKLDRKISERRVFPAVDVNPSGTRKDELLLNPDEARIMHKLRRILSALDNQQAIDLLIKQLKKTKSNAEFLMQVASSAPMAGTEKEEDYS

SEQ ID NO: 433 - DNA, 1887 bp, Corynebacterium glutamicum
  CDS (1)..(1887): RXA00736
gctggcctggtgtttccgaaggtgcgtaaacaccgcgatggcgctgcaatgccgttggtggttattacagaaaccgatctgactggtaaccgtgttggcgatattgcaggggcgaaacgtcgacctgcaaaacgccgcaacaaggtggatcctttggcgctggagccaggggatttggtggttcatgaaacccacggcattggtcgttttgtgaagatgactgaacgaaccatttctgcgggtgatgagacctcgcgccgtgaatacattgtgctggagtacgcgccatctaagcgcggacagcccggcgatcagctgtatgtgccgatggatgcgctggatatgctcagccgctacgtcggtggcgagaagccgacgctgtccaaaatgggtggttctgactggaagaacgccaagaagaaggctcgcgctgccgtgcgtgaaatcgccggtgagctggtagaactctacgctaagcgccaatccgcgccgggtcacccgtttgcgccggatacgccgtggcaaaaagagatggaagataacttcccctacgttgagaccgaagaccagatgttggcgatcgatgcggtcaaggaggacatggagaaaagtgtccccatggaccgcgtcatcatcggcgatgtgggttatggcaagacggaagtggcggtgcgcgcggcgttcaaggctgtgcaagacggcaagcaggtagccgttctggtgcccaccacgttgcttgcgcagcagcaccagtccacgtttgaagagcgtatgactggtttccctgtcaccatcaagggattgtcacgctttacttcgcctgcggaatcgcgggagattctctccggtttggctgcaggatcggtggatatcgtcatcggtactcaccgtttgctgcagactggcgtgcagtggaaaaacctagggcttgtcattgtggatgaggagcagcgtttcggcgtggaacataaggagcacatcaaggctctgcgtactcacgtggatgtgctgaccatgtccgcgaccccgattccgcgcaccctggaaatgtccatggccggtatccgtgagatgaccaccatgctcaccccgccggaagatcgccacccaattcttacctatgtgggaccgtatgaagacaagcaggtcgcggcatcaattcgccgtgagctgctgcgcgatggccaggtctttttcatccacaacaaggtggcagatattgagaagaaggcccgcgagatccgcgatctagttcccgaagcccgagtggtcgttgcccacggccagatgagtgaagagctgctggaacaaaccgttcaaggtttctgggaccgcgaatacgatgtgctggtgtgtaccaccatcgtggaaactggtctggatatttccaacgccaacacgcttatcgtggaaaatgcccaccacatgggcttgtctcagctgcaccagctgcgtggccgcgtgggtcgttcccgtgagcgcggttacgcctacttcctgtatccaaagggcgcgacactgactgaaatgtcctacgaccgcctggcaacgattgcccaaaacaatgatttgggtgccggtatggcggttgccatgaaggatttggaaatgcgtggcgccggcaacgtgctgggtgcagaacaatcaggccatatcgctggcgtgggctttgacctgtacgttcgcctcgtcggcgaagcagtggaagcctaccgcgcgctggctgatggcaaagttgttgatggcaccgtcaagggaccaaaggaaatccgcgtggaccttcccgtggatgcccacattcccgaaaagtacatcaacgccgagcgtctgcgtctggaaatctaccgcaagctcgcgcagtccgaatcggaagtggatctgcgcctt

SEQ ID NO: 434 - protein, 629 aa, Corynebacterium glutamicum
AGLVFPKVRKHRDGAAMPLVVITETDLTGNRVGDIAGAKRRPAKRRNKVDPLALEPGDLVVHETHGIGRFVKMTERTISAGDETSRREYIVLEYAPSKRGQPGDQLYVPMDALDMLSRYVGGEKPTLSKMGGSDWKNAKKKARAAVREIAGELVELYAKRQSAPGHPFAPDTPWQKEMEDNFPYVETEDQMLAIDAVKEDMEKSVPMDRVIIGDVGYGKTEVAVRAAFKAVQDGKQVAVLVPTTLLAQQHQSTFEERMTGFPVTIKGLSRFTSPAESREILSGLAAGSVDIVIGTHRLLQTGVQWKNLGLVIVDEEQRFGVEHKEHIKALRTHVDVLTMSATPIPRTLEMSMAGIREMTTMLTPPEDRHPILTYVGPYEDKQVAASIRRELLRDGQVFFIHNKVADIEKKAREIRDLVPEARVVVAHGQMSEELLEQTVQGFWDREYDVLVCTTIVETGLDISNANTLIVENAHHMGLSQLHQLRGRVGRSRERGYAYFLYPKGATLTEMSYDRLATIAQNNDLGAGMAVAMKDLEMRGAGNVLGAEQSGHIAGVGFDLYVRLVGEAVEAYRALADGKVVDGTVKGPKEIRVDLPVDAHIPEKYINAERLRLEIYRKLAQSESEVDLRL

SEQ ID NO: 435 - DNA, 1116 bp, Corynebacterium glutamicum
  CDS (101)..(1093): RXN00737
tcgatatggtggccaagcgcggtgatttgcctacccgcggtgcattttgatattttccccaccacattggattatccggtgcgtgtggagttctggggcgatgaaggtctctgacattaggcagttctctgtcgccgatcagcgcaccattccagaaatcaccatcaagagcattgagattttcccggcacgggaattgctcattactgaagaagtggcatcgcgtgcggagtctcttatttctaagcacccgggcaacccgacgcttgtggagatgctgtcgaggattgcggattcccaagatgttgatggcatggaggcgttgattccggcgctgacggatacgccgatggttccgatgctggagctcatgccggaaaacacccatgtgttggtgattgctccggagaaggtgcgccgacgcattgcggatctggaagcaaccgatgctgagtttttgatggctggttgggaagcagctgcgatgggtgctgatggtccagtggctgcggaaggcctggacttggaagcttctagctatcgcagttatgaaagtttggaggtttctgcgtcgaaaagcgatgtgcgttggtggactttcgcgccgccgggcatgtttgaggcctcggaggaggcgacgctgccgcttgattttgaagccgggccggcgccgcgcggtgagctgccgaagatcgatgcgatgatggcgcagctgcttgcgcacacaaccggcggtgggcgggctgcgtttatcgcgccgacccaaggtgcgattaagcgcatggtcgatcgtttcgcggaaaagggcattcccacccatgtggcgaccccgggttgggagccaacgcctggtcaagtgactctttatcatgcgctgagccatgctggcctggtgtttccgaaggtgcgtaaacaccgcgatggcgctgcaatgccgttggtggttattacagaaaccgatctgactggtaaccgtgttggcgatattgcagggcgaaacgtcgacctgcaaaacgccgcaacaaggtggatcctttggcgctggagccaggggatttggtggttcatgaaacccacggcattggtcgttttgtgaagatgactgaacgaaccatt

SEQ ID NO: 436 - protein, 331 aa, Corynebacterium glutamicum
MKVSDIRQFSVADQRTIPEITIKSIEIFPARELLITEEVASRAESLISKHPGNPTLVEMLSRIADSQDVDGMEALIPALTDTPMVPMLELMPENTHVLVIAPEKVRRRIADLEATDAEFLMAGWEAAAMGADGPVAAEGLDLEASSYRSYESLEVSASKSDVRWWTFAPPGMFEASEEATLPLDFEAGPAPRGELPKIDAMMAQLLAHTTGGGRAAFIAPTQGAIKRMVDRFAEKGIPTHVATPGWEPTPGQVTLYHALSHAGLVFPKVRKHRDGAAMPLVVITETDLTGNRVGDIAGRNVDLQNAATRWILWRWSQGIWWFMKPTALVVL

SEQ ID NO: 437 - DNA, 480 bp, Corynebacterium glutamicum
  CDS (1)..(480): FRXA00737
cacccgggcaacccgacgcttgtggagatgctgtcgaggattgcggattcccaagatgttgatggcatggaggcgttgattccggcgctgacggatacgccgatggttccgatgctggagctcatgccggaaaacacccatgtgttggtgattgctccggagaaggtgcgccgacgcattgcggatctggaagcaaccgatgctgagtttttgatggctggttgggaagcagctgcgatgggtgctgatggtccagtggctgcggaaggcctggacttggaagcttctagctatcgcagttatgaaagtttggaggtttctgcgtcgaaaagcgatgtgcgttggtggactttcgcgccgccgggcatgtttgaggcctcggaggaggcgacgctgccgcttgattttgaagccgggccggcgccgcgcggtgagctgccgaagatcgatgcgatgatggcgcagctgcttgcgcacaca

SEQ ID NO: 438 - protein, 160 aa, Corynebacterium glutamicum
HPGNPTLVEMLSRIADSQDVDGMEALIPALTDTPMVPMLELMPENTHVLVIAPEKVRRRIADLEATDAEFLMAGWEAAAMGADGPVAAEGLDLEASSYRSYESLEVSASKSDVRWWTFAPPGMFEASEEATLPLDFEAGPAPRGELPKIDAMMAQLLAHT

SEQ ID NO: 439 - DNA, 928 bp, Corynebacterium glutamicum
  CDS (101)..(928): RXN01872
attgcttggctcatggagttcatcatgcgccaacagcaaatattagtaaaatgttagaaatagctgtttttgattcactttgtgcatgtaggctgtgaccatgggcaacgacggcggagacctgcgaatcgacgacctacgcagcttcatttcagtcgctcaatcaggccacctaaccgaaactgcccaaagattaggcatcccgcagcccacactttccagacgaatcagccgagtggaaaaacacgcaggcaccccacttttcgaccgcgccggccgcaaactcgtcctcaaccaacgaggccacgccttcctcaaccacgccagcgccatcgtcgcagaattcaactccgccgcaactgaaatcaaacgcctcatggacccagaaaaaggcacaatccgactggacttcatgcattccttgggcacttggatggtccccgaacttatccgaacattccgcgccgaacaccccaacgtagaattccaactccaccaagcggcagcaatgctcctggtagatcgtgttttggctgatgaaactgacctcgcattagttggccccaaacctgccgaggttggtacctctttagggtgggcgccactgcttcgtcaacgacttgccctagctgttcccgcagatcaccggcttgcctccttttctggccaaggagaattgccgttgattactgcggcggaagaacctttcgtggcgatgcgagcaggtttcggcacccgactcctcatggatgcattagccgaagaagccggttttgttcccaatgtggttttcgaatccatggaactcaccaccgtcgcagggcttgtcagcgcaggtctcggcgttggtgtggttccgatggatgatccctacctttccacagtgggaatcgtgcaacgcccacttagtccacccgcttatagggaa

SEQ ID NO: 440 - protein, 276 aa, Corynebacterium glutamicum
MGNDGGDLRIDDLRSFISVAQSGHLTETAQRLGIPQPTLSRRISRVEKHAGTPLFDRAGRKLVLNQRGHAFLNHASAIVAEFNSAATEIKRLMDPEKGTIRLDFMHSLGTWMVPELIRTFRAEHPNVEFQLHQAAAMLLVDRVLADETDLALVGPKPAEVGTSLGWAPLLRQRLALAVPADHRLASFSGQGELPLITAAEEPFVAMRAGFGTRLLMDALAEEAGFVPNVVFESMELTTVAGLVSAGLGVGVVPMDDPYLSTVGIVQRPLSPPAYRE

SEQ ID NO: 441 - DNA, 865 bp, Corynebacterium glutamicum
  CDS (101)..(865): FRXA01872
attgcttggctcatggagttcatcatgcgccaacagcaaatattagtaaaatgttagaaatagctgtttttgattcactttgtgcatgtaggctgtgaccatgggcaacgacggcggagacctgcgaatcgacgacctacgcagcttcatttcagtcgctcaatcaggccacctaaccgaaactgcccaaagattaggcatcccgcagcccacactttccagacgaatcagccgagtggaaaaacacgcaggcaccccacttttcgaccgcgccggccgcaaactcgtcctcaaccaacgaggccacgccttcctcaaccacgccagcgccatcgtcgcagaattcaactccgccgcaactgaaatcaaacgcctcatggacccagaaaaaggcacaatccgactggacttcatgcattccttgggcacttggatggtccccgaacttatccgaacattccgcgccgaacaccccaacgtagaattccaactccaccaagcggcagcaatgctcctggtagatcgtgttttggctgatgaaactgacctcgcattagttggccccaaacctgccgaggttggtacctctttagggtgggcgccactgcttcgtcaacgacttgccctagctgttcccgcagatcaccggcttgcctccttttctggccaaggagaattgccgttgattactgcggcggaagaacctttcgtggcgatgcgagcaggtttcggcacccgactcctcatggatgcattagccgaagaagccggttttgttcccaatgtggttttcgaatccatggaactcaccaccgtcgcagggcttgtcagcgcaggtctcggcgttggtgtggttccgatggat

SEQ ID NO: 442 - protein, 255 aa, Corynebacterium glutamicum
MGNDGGDLRIDDLRSFISVAQSGHLTETAQRLGIPQPTLSRRISRVEKHAGTPLFDRAGRKLVLNQRGHAFLNHASAIVAEFNSAATEIKRLMDPEKGTIRLDFMHSLGTWMVPELIRTFRAEHPNVEFQLHQAAAMLLVDRVLADETDLALVGPKPAEVGTSLGWAPLLRQRLALAVPADHRLASFSGQGELPLITAAEEPFVAMRAGFGTRLLMDALAEEAGFVPNVVFESMELTTVAGLVSAGLGVGVVPMD

SEQ ID NO: 443 - DNA, 615 bp, Corynebacterium glutamicum
  CDS (101)..(592): RXA02413
acccggcagcgttgaaagcgaagaagcaacagaagaaattagaaaagcaacaacgccaaagaggcttatagttttcacctagcgactacacttaattgacatgacaagtgagaattccgaatcccaggacatttggctaaccgatgagcaacaagatgtgtggctcgatgtgtggacaatgcgaatcggcctgcctgctcgcttggatgctcaactgaaagaagctgcgggtgtcagccactttgagtacttcaccatggcgcagatttctatggccccggaacatcgggtgcgcatgagtgagcttgctgagctgtccgatatgacgctatcgcatctatctagagtggttactcgcctagaaaaggctggctgggtgaagcgtgttcccgatcctgatgatggtcgcgccaccgttgctgtgctcacggactctgggtgggagaaagttaaagcaacagcccctggtcatgtgaaggaagtgcgtcgtttggtgtttgacgatctcactccagaagaactcaaggtaatgggcaccgcaatgaagaagattgtgaaccgactcgatatgtccaacaggctgccccgggtgtagttagaagttttaagaaatgt

SEQ ID NO: 444 - protein, 164 aa, Corynebacterium glutamicum
MTSENSESQDIWLTDEQQDVWLDVWTMRIGLPARLDAQLKEAAGVSHFEYFTMAQISMAPEHRVRMSELAELSDMTLSHLSRVVTRLEKAGWVKRVPDPDDGRATVAVLTDSGWEKVKATAPGHVKEVRRLVFDDLTPEELKVMGTAMKKIVNRLDMSNRLPRV

SEQ ID NO: 445 - DNA, 1022 bp, Corynebacterium glutamicum
  CDS (1)..(999): RXN01404
cagaagatgagcacatcccgccccacaatttatgacgtcgccaaagccgcaggcgtctccaaatccttggtttctctcgtgcttcgcggctcccccaacgtgagcaaagaatccgaagccgcggtcaagaccgcgataaaaaagctcaactaccagccaaatcgcgccgcatcagaccttgcggccaagcgcacgcagctcattgcagtgcttatcgacgactactccaacccgtggttcatcgacctgattcaaagcctcagcgatgtgctcacccccaaggggtaccgactgtccgtcattgactcattaacctctcaagccggcaccgatcccattaccagtgcactatcaatgcgccccgatggaatcatcatcgcccaagacatccccgatttcactgtccccgattccctacccccatttgtcatcgcaggcaccagaatcacccaagccagcacccatgattcagtggccaacgatgacttccggggcgcagaaatagccacaaaacacctcatcgatcttggacacacccacatcgcccacctacgcgtgggaagcggcgctggcttacgacgcttcgaaagctttgaggcaaccatgcgtgcacatggcctggagccgctttccaacgattacctcggccccgccgttgagcacgccgggtacaccgaaaccctcgcactactcaaagagcacccggaggtcaccgccattttctcctcaaacgacatcaccgccatcggagcactcggtgccgcccgtgaactaggtttacgcgtacctgaagatctatcaataatcggatatgacaacactcccctcgcccaaacccgactgatcaacctcaccaccatcgacgacaacagcatcggcgtcggctacaacgccgctctcttgttgctgagcatgcttgatcccgaggcaccccacccggagatcatgcatacgttgcagccctcgctgattgaacggggcacgtgcgcgccacgtggatagctaccccaaatacttggact

SEQ ID NO: 446 - protein, 333 aa, Corynebacterium glutamicum
QKMSTSRPTIYDVAKAAGVSKSLVSLVLRGSPNVSKESEAAVKTAIKKLNYQPNRAASDLAAKRTQLIAVLIDDYSNPWFIDLIQSLSDVLTPKGYRLSVIDSLTSQAGTDPITSALSMRPDGIIIAQDIPDFTVPDSLPPFVIAGTRITQASTHDSVANDDFRGAEIATKHLIDLGHTHIAHLRVGSGAGLRRFESFEATMRAHGLEPLSNDYLGPAVEHAGYTETLALLKEHPEVTAIFSSNDITAIGALGAARELGLRVPEDLSIIGYDNTPLAQTRLINLTTIDDNSIGVGYNAALLLLSMLDPEAPHPEIMHTLQPSLIERGTCAPRG

SEQ ID NO: 447 - DNA, 523 bp, Corynebacterium glutamicum
  CDS (101)..(523): RXN02827
  All occurrences of n = any nucleotide
  All occurrences of Xaa = any amino acid
cggtttacttttatttatcgaatgaatcatgtacatagaataataagcattaaagggggggcgggtaggaagaagcagccgtgtcgcatatgcttactttatgtatgagcagcagaagatccttaacgaagtcagtgaaaaacgtcttcaggcaatcaaagattttacagaactgggatctggattcaagattgcgatgcgggatctttccattcgcggtgcaggtaatctcttaggtgctcagcagcatggatttattgatgcagtcggtttcgatatgtattctcaaatgctaagcgaagctgtttntcgtaaacaaggaaagaatagtcaagtggagaagnccnctgttgagatcgaccncggtgtcgatgcgtatctacctgaaacatacgtggcagatcancggcagaaaatcgagatctataaacgaattcgtgaacttgattcgcaagaaatgctagatgaactagaagatgatctgctcgaccgttttggagaacanccagaagaagtagcacat

SEQ ID NO: 448 - protein, 141 aa, Corynebacterium glutamicum
  All occurrences of Xaa = any amino acid
MYEQQKILNEVSEKRLQAIKDFTELGSGFKIAMRDLSIRGAGNLLGAQQHGFIDAVGFDMYSQMLSEAVXRKQGKNSQVEKXXVEIDXGVDAYLPETYVADXRQKIEIYKRIRELDSQEMLDELEDDLLDRFGEXPEEVAH

SEQ ID NO: 449 - DNA, 564 bp, Corynebacterium glutamicum
  CDS (101)..(541): RXN02732
agcccttaaactctcattcttttgttagacttgttcactaattacagacatccaggggcttagatttttaacccctgtcataagtttttgggaaggtcacatgagcgagaattacagcaagattgtcgttggcactgatggatctaagtcgtcccttctagcagttgaacgagctgcccgaatcgccgcagctttcgacgccactttgatcatcggatgtgcatactacgaaagcaaggaagacgcttcagagactttgcgccaggattctgtaacaatcctcggcgatgatcctgctcgtgaaaacctggacaaggcagcagatgcagcacgcgctgtcggcgcaacctccatcgagactgaggttcgtactggcactccagttgaggctttgatggcaatcgttaatgatcaccaagctgaccttcttgtggttggtaaccgtggaatcaactatttgaccggccgtttgttgggttcagttccagctgatgttgcacgccaatcagactgcgatgtcatgattgttcacaccgtgagctaaaaaaaccaaaccaaaaccgg

SEQ ID NO: 450 - protein, 147 aa, Corynebacterium glutamicum
MSENYSKIVVGTDGSKSSLLAVERAARIAAAFDATLIIGCAYYESKEDASETLRQDSVTILGDDPARENLDKAADAARAVGATSIETEVRTGTPVEALMAIVNDHQADLLVVGNRGINYLTGRLLGSVPADVARQSDCDVMIVHTVS

SEQ ID NO: 451 - DNA, 1272 bp, Corynebacterium glutamicum
  CDS (101)..(1249): RXN01671
tctaaaaacacatttttaagccctcccggcgcagctgaaaactcagtcgccgggagggcttttttgtacccgaatttgtacccgaatttaaggaatcgctatgaatcatgttgttaattttgcttcacatttggaagacgcagccctgaagcaagccgaagctactgccaccatgccgtttatttacccgcatgtggcgttgatgcctgatgctcactttgggctgggttcgtcggtgggaacggtgttcggcaccaagggtgcgatcattccggcggctgtgggtgtggatataggttgcggaatgataggagtgtgtaccaattacacggcctctgacctggagggacgtgatttggtgacgcttcgggattacatcgagcgggtgattccgttgtctcctggaaattacaattccaccaccttgaaggaaaccgcgaaggtgaaggtcgcggagttggaggaactcgcggagcgcgatggtgtagatttgtcgcactctccgacgtggaagcgccagttgggttcgcttggtggaggtaatcacttcattgagttgtgtcttgatgagttggatcgggtgtggatgtttttgcactctggttcccgcggtgtgggtaacaagattgcccagaagcacatcaagatcgcgcaggccgagtgtaagaatgaggagcttcccgataaggatcttgcgtacttgaccgaggggactgaggagtttgagtcttacatcaaggaactgaattgggcgcagcgttttgcgttcctcaacagggaagaaatgatggacagattcgcacgggagctgggttttttcgtcgacaagcagcttgaagaggtcgagcgcatcaactgccaccataactacacggtccaggaggagcactacggcgagaccatttggctcacccgtaagggtgccgtgttggcggacgaaggcacgccggcgttgattccggggtcgatgggcaccgcgtcgtacgtgggcagtggcaagggcaacgccgaggcactgcggtcggcgccgcatggggcgggccggaggatgtcgcgcaaccaggctaaaaagcgcttctcgacggccgacctggattctcggatggcgggcatcgtctaccggcccggcaaggagtggatcgatgaaattcccgacgcttacaaagacatcgatcaggtgatggccgatgctgccgatttggtgacaattcgccataaattgcgccagatcgtcaacgtgaaaggcacctaaagcgcattacggtaaagtgc

SEQ ID NO: 452 - protein, 383 aa, Corynebacterium glutamicum
MNHVVNFASHLEDAALKQAEATATMPFIYPHVALMPDAHFGLGSSVGTVFGTKGAIIPAAVGVDIGCGMIGVCTNYTASDLEGRDLVTLRDYIERVIPLSPGNYNSTTLKETAKVKVAELEELAERDGVDLSHSPTWKRQLGSLGGGNHFIELCLDELDRVWMFLHSGSRGVGNKIAQKHIKIAQAECKNEELPDKDLAYLTEGTEEFESYIKELNWAQRFAFLNREEMMDRFARELGFFVDKQLEEVERINCHHNYTVQEEHYGETIWLTRKGAVLADEGTPALIPGSMGTASYVGSGKGNAEALRSAPHGAGRRMSRNQAKKRFSTADLDSRMAGIVYRPGKEWIDEIPDAYKDIDQVMADAADLVTIRHKLRQIVNVKGT

SEQ ID NO: 453 - DNA, 1137 bp, Corynebacterium glutamicum
  CDS (101)..(1114): RXS00671
gccccgggtgcacaggaatctttcgattttccaaacatccttcatggttttagaaacctttaccgacgtcaaatagcggtcgtcactcaaggagagttcaatgctcatttcacagcgcccaaccatcaccgaggaatttgttaataacgcacgttcccggtttgtcatcgagccactggagccaggttttggctacaccctcggtaactccctgcgccgtaccctgctgtcctccattcctggagcagcagtaaccagcgtcaagattgacggtgtactccacgagttcaccaccatcagcggtgttaaggaagatgtctctgacatcatcttgaacatcaagggattggttttgtcttctgattccgatgagccagttgttatgcagctggtcaaggaaggcccaggagttgtaactgcaggtgacattcagccaccagcaggcgtggagatccacaacccggatctgcacattgcaaccctgaacgagaccgccaagattgagatcgagctcatcgtcgagcgtggacgtggctacgttcccgcaactgttactgcaaccggtggagagatcggccgcattccggtcgatcagatctactccccagtactgaaggtcagctacaaggttgaagctactcgtgttgagcagcgcaccgactttgacaagctggtcatcgacgttgagaccaagaactctattaccgcacgtgacgccctggcgtcggcaggtaagaccctggttgagctgttcggcctcgcacgcgagctgaacatcgcagccgagggcatcgagatcggaccatctcctcaggagaccgagtacatcgctgcctacagcatgccaatcgaggatctggacttctctgtccgttcctacaactgcctcaagcgcgaagacatccacaccgtgggtgaactcgcagagcgcgctgagtccgatttgctggatatccgcaacttcggacagaagtcgatcaacgaggtaaagatcaagcttgctggcctgggtctgaccctgaaggatgctcctgaagacttcgatccttcaactcttgaaggttatgacgccgaaactggtggctacatcgatgtcgaggcggaagattccgagtaagtcgcatggtccaattcatg

SEQ ID NO: 454 - protein, 338 aa, Corynebacterium glutamicum
MLISQRPTITEEFVNNARSRFVIEPLEPGFGYTLGNSLRRTLLSSIPGAAVTSVKIDGVLHEFTTISGVKEDVSDIILNIKGLVLSSDSDEPVVMQLVKEGPGVVTAGDIQPPAGVEIHNPDLHIATLNETAKIEIELIVERGRGYVPATVTATGGEIGRIPVDQIYSPVLKVSYKVEATRVEQRTDFDKLVIDVETKNSITARDALASAGKTLVELFGLARELNIAAEGIEIGPSPQETEYIAAYSMPIEDLDFSVRSYNCLKREDIHTVGELAERAESDLLDIRNFGQKSINEVKIKLAGLGLTLKDAPEDFDPSTLEGYDAETGGYIDVEAEDSE

SEQ ID NO: 455 - DNA, 1077 bp, Corynebacterium glutamicum
  CDS (101)..(1054): RXS02760
tagcatgggacgaaagctgttagatagcatgttgcatccctgcgttggctgattatcgctgggttttagggtcgatagataggttgggagaacacgcattatgagcgatgagaacattaacgagtttgagcaggacgaggatctgaacttcggcgcgagctttagtgatgaattcgcagatgacgatttcgatgcagaagcagacgtagaagcagatgctgctgcagaggcctctgccctggaagctgagcaggatctggaagaagagaccctagatgctccagaagaagccgcagaagaagctcctgctgctgcagagtccgaagctccagtagaagaggacgaagaggctgacagccttgctcaggcggctgctgcacttggtgacaccgatgagcaggacgcggatgcagagtacaaggctcgtctgcgtaagttcactcgtgagctgaagaagcagcctggtgtttggtacatcattcagtgctactccggctacgagaacaaggtgaaggcgaaccttgacatgcgtgctcagacccttgaggttgaggatgacatctttgaggttgttgttcctatcgagcaggtcactgagatccgtgatggtaagcgcaagctggttaagcgtaagttgctgccgggctacgttttggtccgcatggacatgaatgaccgcgtgtggtctgttgttcgcgatacacctggtgtgaccagctttgtgggtaacgagggcaatgcaactcctgtgaagcaccgcgatgttgcgaagttcttgatgcctcaggagcaggctgttgtcaccggtgaggctgctgctgcggctgccgagggtgagcaggttgtggctatgcctaccgataccaagaagcctcaggttgctgtggacttcactgttggtgaggctgtgaccattctgactggtgctttcgcttctgtttctgcaacgatttcttctatcgatcctgagctgcagaagctggaagttttggtgtccatctttggtcgtgaaactcctgttgatctcagcttcgaccaggttgagaaggttagctagtagctaaactgcaccactta

SEQ ID NO: 456 - protein, 318 aa, Corynebacterium glutamicum
MSDENINEFEQDEDLNFGASFSDEFADDDFDAEADVEADAAAEASALEAEQDLEEETLDAPEEAAEEAPAAAESEAPVEEDEEADSLAQAAAALGDTDEQDADAEYKARLRKFTRELKKQPGVWYIIQCYSGYENKVKANLDMRAQTLEVEDDIFEVVVPIEQVTEIRDGKRKLVKRKLLPGYVLVRMDMNDRVWSVVRDTPGVTSFVGNEGNATPVKHRDVAKFLMPQEQAVVTGEAAAAAAEGEQVVAMPTDTKKPQVAVDFTVGEAVTILTGAFASVSATISSIDPELQKLEVLVSIFGRETPVDLSFDQVEKVS

SEQ ID NO: 457 - DNA, 662 bp, Corynebacterium glutamicum
  CDS (1)..(648): RXS02830
cggcggctggaagacagccttggcgtgtcgctgtttgaacgggccgggcgcgggctggcgctgacaggggcgggcgatcagcttttgtcgcaggcgcgccgcctgatcgccctgaacgacgaggtatacgcccgcttgaacgccggtgcctacgagggcgaggtgacgctgggcgtgcctcaagacgtgatctaccccgtcatcccgcgcgtcttgcagcaattcgcccgcgattttccccgcgtgcaaattcacctgatctcgaacttcacgctgatgctgaaagaacagttccgccgcggcgaaatcgacgtgatgctgacgaccgaggacgagctgggcgagggcggcgagacgctggcccagcgcgagctgatctgggtcggcgcaccgggcgggtcggcgtggacccgcaggccgctgcccttggcgtttgaacgcgcctgcattttccggtctttcgtgcagcgccgcttggatgccaacagcatcgattggcagatggtggtcagcagcgaatccacacggacaattgaagcgaccgtcagtgccgatctggcggtgcatacctatatcgagggggccgagccggcgcacctcgagcgtattgccacaacggcgccctgccggaactacgtctttcaacattaacctctattatg

SEQ ID NO: 458 - protein, 216 aa, Corynebacterium glutamicum
RRLEDSLGVSLFERAGRGLALTGAGDQLLSQARRLIALNDEVYARLNAGAYEGEVTLGVPQDVIYPVIPRVLQQFARDFPRVQIHLISNFTLMLKEQFRRGEIDVMLTTEDELGEGGETLAQRELIWVGAPGGSAWTRRPLPLAFERACIFRSFVQRRLDANSIDWQMVVSSESTRTIEATVSADLAVHTYIEGAEPAHLERIATTAPCRNYVFQH

SEQ ID NO: 459 - DNA, 1123 bp, Corynebacterium glutamicum
  CDS (101)..(1093): RXS03207
ccccaatgtgggggtgttaagaactccataaaagcgcttgggaactttttgtggaagcagtccgttgaacctcttgaaccgcgaatttaggaggccagttatgacagcaccgtccacgcaggatctcgcaacgactgaacgtgaggtagatcccggcagcagaaggggccaaaccaacgacaatccctcgcaggaccttgttcgcgtttacctcaacggcatcggcaaaactgccttgcttaccgcggaggatgaagttgagctcgcacagaccattgaggttggcctttatgcagagcaccttctgaaaaactctgaagagccactcacccgcgccatgaagcgcgatctaaaggttcttgccaaggacggcaagaaggctcgttcccacctcctcgaggcaaacctgcgcctggtggtgtcccttgctaagcgctacaccggccgcggcatgccactgctggatcttatccaggagggcaacctcggactgatccgcgcgatggaaaagtttgattactccaagggctttaagttctccacctacgcaacctggtggatccgccaggcaatcacccgcggcatggcagatcagtcccgcaccatccgcctcccagtccaccttgtggagcaggtgaacaagctttcccgcatcaagcgcgagttgtaccagcacttgggccgtgaagccaccaatgaggaactcgcagaagagtccggcattgaagagtccaagattgaaatgctgcttcgtcagtctcgcgatccagtgagcttggacatgccagtcggcgccgatgaagaagctcctttgggtgacttcattgaggattctgaggccaccgatgcagaatccgcagtggttgcttccatgcgccactccgatatccgcgcggtccttaacactctcgagccacgcgagcaggatgtcatccgtttgcgctacggcctcgatgacggtgtgccacgcacccttgatcagattggtcgccgcttcggactgtcccgtgagcgcgtccgccagatagagcgtgaagtcatgagtaagctccgcgatggagagcgcgcatcacgtcttcgtgagtacgcccagtaaaagcgtgaactaacaatcgaagcgtcg

SEQ ID NO: 460 - protein, 331 aa, Corynebacterium glutamicum
MTAPSTQDLATTEREVDPGSRRGQTNDNPSQDLVRVYLNGIGKTALLTAEDEVELAQTIEVGLYAEHLLKNSEEPLTRAMKRDLKVLAKDGKKARSHLLEANLRLVVSLAKRYTGRGMPLLDLIQEGNLGLIRAMEKFDYSKGFKFSTYATWWIRQAITRGMADQSRTIRLPVHLVEQVNKLSRIKRELYQHLGREATNEELAEESGIEESKIEMLLRQSRDPVSLDMPVGADEEAPLGDFIEDSEATDAESAVVASMRHSDIRAVLNTLEPREQDVIRLRYGLDDGVPRTLDQIGRRFGLSRERVRQIEREVMSKLRDGERASRLREYAQ

SEQ ID NO: 461 - DNA, 690 bp, Corynebacterium glutamicum
  CDS (101)..(667): RXA02418
gacacggactagtgcccgtgtataactcttgaaagtcagatctcccgttcatcctagatgatgaacgggtttttggtctgcataggggcaatcacctcaagtggttcggtacgtcaaattttcccgcactgctaacagaggagtccacatcagcgctgaagctcgcattaatgagcgcatccgagttcccgaagtccgccttgtcggacctaacggtgagcaagtaggcatcgtccgtatcgaagatgcccgcaagctcgcattcgacgcagacctagacctggtcgaggtcgcacccaacgccaaacctccagtctgcaagatcatggactacggaaagttcaagtacgaagcggcccaaaaggctcgtgagtcacgcaagaatcagcagcagaccgtggtcaaagagcaaaagcttcgtcccaagatcgatgatcatgattatgagacgaagaagaacaatgtgatccgattccttgaaaagggatcaaaggtcaaagtcacgatcatgttccgtggtcgtgagcaggctcgcccagagcttggctacaggctcctcgagcgactggcaaacgatgtcgtagattttggcatcgtggaaacccgcgcaaagcaggacggacgaaacatgacaatggttctcggtccggtgcgcaagggcaagaaataatcacgaatagggtttaagga

SEQ ID NO: 462 - protein, 189 aa, Corynebacterium glutamicum
VVRYVKFSRTANRGVHISAEARINERIRVPEVRLVGPNGEQVGIVRIEDARKLAFDADLDLVEVAPNAKPPVCKIMDYGKFKYEAAQKARESRKNQQQTVVKEQKLRPKIDDHDYETKKNNVIRFLEKGSKVKVTIMFRGREQARPELGYRLLERLANDVVDFGIVETRAKQDGRNMTMVLGPVRKGKK

SEQ ID NO: 463 - DNA, 3135 bp, Corynebacterium glutamicum
  CDS (101)..(3112): RXN01496
atgaagcatcagcgatgaacgtcaataattaacgctagaggtcaaaggtcccttaccttttaagggccttcgaacctctggcaagaactagaggagagaagtgcccggaaagctacgtgtacatgagcttgctaagcaactcggtattaccagcaaggaactacttgccacccttaaggataaaggcgagtttgttaaaaccgcatcatccacaattgaacccccagttgtgaagaggatgcaggagcactacggttcgagcggttcggataagtccgacaccgctgcgaagcctgcagcggcaaagcctgctgcgccaaaaccagctgcgtcagcagctccaaagccaggtgctccagcaaaacctgcagcacctgcagcaaagcctgccccagctgctccttctgcagcttctgcagcaaagccaggcgcagcacctaagccaggcgttcaggcaaagcctgcagcagccgctaagccaggcgctccagcaaagccagcagcacctgcagctccttctgccgctaagtcaggttcagcttcaaagcctgcagcagcagctaagccagcattttctggcccaactccaggcgatgcatctaagaaggcagagccagcagctaagccaggcgcggaagcacctcgcccaggcggcatgccacgtccaatgggcaagcctgctccaaagccaggcgcacgtgcaccacgtgtagctaacaacccattctccaccggtggtggcgagcgtccagctcctcgcccaggtggcggcccacgtcctggtggcggacctcgcccaggcggtggaccacgtccacagggccagggtcgtccaggtggccagcgagatggtcagcgcgacggacagcgtgatggtcagggtaaccgcggcggtcagcgtcaaggcgctggcgcaggtggaccacgcccacagggtggaccacgccctcagggcggttcacgcccacagggtggctccgctcagggtgctcagggagcaccttcccaggagcgtcaaggtggcggacgtcgtccatccccagcaatgatgcctccaaccccaggtcagatgcctgctaaggcacctggcaagggtggtcgtggtggccaagccggcggtggcgctggtggcggattcaaccgtggtggcggaaccggtggcggcgcaggccgtggcggtcgtcgtggcggtaccgcaggtgcattcggccgtccaggtggtgctccacgcaggggacgtaagtcgaagcgtcagaagcgcaacgagtacgaatcaatgcaggcaccgaacgtcattggtggcgttcgtttgccagacggcaagggtgcaaccatccgcctcgcgcgcggtgcatctttggctgacttcgctgacaagatcggcgcagacgcagcagcattggttcaggctctgttcaacttgggtgaaatggtcaccgcaactgcatcggtttctgatgaaaccttgcagctgctcggtgaggaaatgaactacaaggttcaggttgtttccccagaagatgaagaccgtgagctgctcgaaagcttcgaccttcagttcggtgaggacgaaggtggcgaggctgaccttgctaagcgtcctccagtggttaccgtcatgggtcacgttgaccacggtaagactcgtttgctggatactatccgtaaggcaaatgtgggctccgacgaagccggcggcattacccagggcattggtgcataccaggtcaaggtaaatgtcgaggacactgagcgcacgatcaccttcctggataccccaggtcacgaggccttcaccgcaatgcgtgcccgtggtgcaaagtccacagatatcgcggttctggttgttgcagcagacgacggcgttatgcctcagactgtggaagcaatcaaccacgctaaggctgcagatgtaccaatcgtggttgcagtgaacaagattgataagccagaagcttctccagagaagatccgtggtcagctgaccgaatacggattgatccctgaagagtacggtggcgacaccatcttcgttgacatctctgcaaagcagggactgaacatcgatgagctgctcgcttctgtctgcctgaccgcagacgctgagcttgaccttgttgctaacccagaaatggacgcacagggtgttgcaattgaagctcacctcgaccgtggtcgtggaccagtggcaaccgttatcgtccagcgcggtaccctgcgcgtcggtgactccatcgttgcaggcgatacctacggacgtgttcgccgcatggtggacgaatacggacgcgacgttgaagaggccggaccttcccgtcctgttcaggttcagggtcttaacggtgtcccaggcgccggcgacaaccttctggttgttgaagatgaccgcattgcacgtcagattgctaaccagcgcaacgcccgcaagcgtaacgctctggcagcacgctcccgtaagcgcgtctccctcgaggatctggattcagttcttaaggaacatagcacccttaacctcattcttaagggcgacaacgcaggttccgtggaagcactggaagaagcattgctaaagattgagatggacgatgaagtccagctcaacatcatcgaccgcggtgtgggtgcagttacccagaccaacgtcacccttgcagctgcatccgacgctgtcatcatcgccttcaacgttcgcgctgaaggtaaggcaactgaggaagcaaacgcagaaggcgtcgatgttcgttactacacgatcatctaccgtgctatcgaagaggtcgaggcggccctcaagggcatgctcaagccaatctacgaagagcgcgttatcggacatgctgagatccgtgcgatcttcaaggcttcctctgtcggcctcatcgcaggttgcatggttgaagacggcaaggtgcgccgaaacgccacagtccgcattattcgcgacggcaacgtcatcgccgagaatgcaaagatcgtgtcccttcgccgtgagaaggacgatgccaccgaagtctctgcaggctacgagtgcggtatggttctgtcttacccagacatctccgtcgacgacaagatcgaggtctacgaaatggttgaggttccacgcgaagcttaagcatttccggctcggggcat

SEQ ID NO: 464 - protein, 1004 aa, Corynebacterium glutamicum
VPGKLRVHELAKQLGITSKELLATLKDKGEFVKTASSTIEPPVVKRMQEHYGSSGSDKSDTAAKPAAAKPAAPKPAASAAPKPGAPAKPAAPAAKPAPAAPSAASAAKPGAAPKPGVQAKPAAAAKPGAPAKPAAPAAPSAAKSGSASKPAAAAKPAFSGPTPGDASKKAEPAAKPGAEAPRPGGMPRPMGKPAPKPGARAPRVANNPFSTGGGERPAPRPGGGPRPGGGPRPGGGPRPQGQGRPGGQRDGQRDGQRDGQGNRGGQRQGAGAGGPRPQGGPRPQGGSRPQGGSAQGAQGAPSQERQGGGRRPSPAMMPPTPGQMPAKAPGKGGRGGQAGGGAGGGFNRGGGTGGGAGRGGRRGGTAGAFGRPGGAPRRGRKSKRQKRNEYESMQAPNVIGGVRLPDGKGATIRLARGASLADFADKIGADAAALVQALFNLGEMVTATASVSDETLQLLGEEMNYKVQVVSPEDEDRELLESFDLQFGEDEGGEADLAKRPPVVTVMGHVDHGKTRLLDTIRKANVGSDEAGGITQGIGAYQVKVNVEDTERTITFLDTPGHEAFTAMRARGAKSTDIAVLVVAADDGVMPQTVEAINHAKAADVPIVVAVNKIDKPEASPEKIRGQLTEYGLIPEEYGGDTIFVDISAKQGLNIDELLASVCLTADAELDLVANPEMDAQGVAIEAHLDRGRGPVATVIVQRGTLRVGDSIVAGDTYGRVRRMVDEYGRDVEEAGPSRPVQVQGLNGVPGAGDNLLVVEDDRIARQIANQRNARKRNALAARSRKRVSLEDLDSVLKEHSTLNLILKGDNAGSVEALEEALLKIEMDDEVQLNIIDRGVGAVTQTNVTLAAASDAVIIAFNVRAEGKATEEANAEGVDVRYYTIIYRAIEEVEAALKGMLKPIYEERVIGHAEIRAIFKASSVGLIAGCMVEDGKVRRNATVRIIRDGNVIAENAKIVSLRREKDDATEVSAGYECGMVLSYPDISVDDKIEVYEMVEVPREA

SEQ ID NO: 465 - DNA, 1375 bp, Corynebacterium glutamicum
  CDS (101)..(1375): FRXA00755
atgaagcatcagcgatgaacgtcaataattaacgctagaggtcaaaggtcccttaccttttaagggccttcgaacctctggcaagaactagaggagagaagtgcccggaaagctacgtgtacatgagcttgctaagcaactcggtattaccagcaaggaactacttgccacccttaaggataaaggcgagtttgttaaaaccgcatcatccacaattgaacccccagttgtgaagaggatgcaggagcactacggttcgagcggttcggataagtccgacaccgctgcgaagcctgcagcggcaaagcctgctgcgccaaaaccagctgcgtcagcagctccaaagccaggtgctccagcaaaacctgcagcacctgcagcaaagcctgccccagctgctccttctgcagcttctgcagcaaagccaggcgcagcacctaagccaggcgttcaggcaaagcctgcagcagccgctaagccaggcgctccagcaaagccagcagcacctgcagctccttctgccgctaagtcaggttcagcttcaaagcctgcagcagcagctaagccagcattttctggcccaactccaggcgatgcatctaagaaggcagagccagcagctaagccaggcgcggaagcacctcgcccaggcggcatgccacgtccaatgggcaagcctgctccaaagccaggcgcacgtgcaccacgtgtagctaacaacccattctccaccggtggtggcgagcgtccagctcctcgcccaggtggcggcccacgtcctggtggcggacctcgcccaggcggtggaccacgtccacagggccagggtcgtccaggtggccagcgagatggtcagcgcgacggacagcgtgatggtcagggtaaccgcggcggtcagcgtcaaggcgctggcgcaggtggaccacgcccacagggtggaccacgccctcagggcggttcacgcccacagggtggctccgctcagggtgctcagggagcaccttcccaggagcgtcaaggtggcggacgtcgtccatccccagcaatgatgcctccaaccccaggtcagatgcctgctaaggcacctggcaagggtggtcgtggtggccaagccggcggtggcgctggtggcggattcaaccgtggtggcggaaccggtggcggcgcaggccgtggcggtcgtcgtggcggtaccgcaggtgcattcggccgtccaggtggtgctccacgcaggggacgtaagtcgaagcgtcagaagcgcaacgagtacgaatcaatgcaggcaccgaacgtcattggtggcgttcgtttgccagacggcaagggtgcaaccatccgcctcgcgcgcggtgcatctttggctgacttcgctgac

SEQ ID NO: 466 - protein, 425 aa, Corynebacterium glutamicum
VPGKLRVHELAKQLGITSKELLATLKDKGEFVKTASSTIEPPVVKRMQEHYGSSGSDKSDTAAKPAAAKPAAPKPAASAAPKPGAPAKPAAPAAKPAPAAPSAASAAKPGAAPKPGVQAKPAAAAKPGAPAKPAAPAAPSAAKSGSASKPAAAAKPAFSGPTPGDASKKAEPAAKPGAEAPRPGGMPRPMGKPAPKPGARAPRVANNPFSTGGGERPAPRPGGGPRPGGGPRPGGGPRPQGQGRPGGQRDGQRDGQRDGQGNRGGQRQGAGAGGPRPQGGPRPQGGSRPQGGSAQGAQGAPSQERQGGGRRPSPAMMPPTPGQMPAKAPGKGGRGGQAGGGAGGGFNRGGGTGGGAGRGGRRGGTAGAFGRPGGAPRRGRKSKRQKRNEYESMQAPNVIGGVRLPDGKGATIRLARGASLADFAD

SEQ ID NO: 467 - DNA, 1751 bp, Corynebacterium glutamicum
  CDS (1)..(1728): FRXA01496
gcagacgcagcagcattggttcaggctctgttcaacttgggtgaaatggtcaccgcaactgcatcggtttctgatgaaaccttgcagctgctcggtgaggaaatgaactacaaggttcaggttgtttccccagaagatgaagaccgtgagctgctcgaaagcttcgaccttcagttcggtgaggacgaaggtggcgaggctgaccttgctaagcgtcctccagtggttaccgtcatgggtcacgttgaccacggtaagactcgtttgctggatactatccgtaaggcaaatgtgggctccgacgaagccggcggcattacccagggcattggtgcataccaggtcaaggtaaatgtcgaggacactgagcgcacgatcaccttcctggataccccaggtcacgaggccttcaccgcaatgcgtgcccgtggtgcaaagtccacagatatcgcggttctggttgttgcagcagacgacggcgttatgcctcagactgtggaagcaatcaaccacgctaaggctgcagatgtaccaatcgtggttgcagtgaacaagattgataagccagaagcttctccagagaagatccgtggtcagctgaccgaatacggattgatccctgaagagtacggtggcgacaccatcttcgttgacatctctgcaaagcagggactgaacatcgatgagctgctcgcttctgtctgcctgaccgcagacgctgagcttgaccttgttgctaacccagaaatggacgcacagggtgttgcaattgaagctcacctcgaccgtggtcgtggaccagtggcaaccgttatcgtccagcgcggtaccctgcgcgtcggtgactccatcgttgcaggcgatacctacggacgtgttcgccgcatggtggacgaatacggacgcgacgttgaagaggccggaccttcccgtcctgttcaggttcagggtcttaacggtgtcccaggcgccggcgacaaccttctggttgttgaagatgaccgcattgcacgtcagattgctaaccagcgcaacgcccgcaagcgtaacgctctggcagcacgctcccgtaagcgcgtctccctcgaggatctggattcagttcttaaggaacatagcacccttaacctcattcttaagggcgacaacgcaggttccgtggaagcactggaagaagcattgctaaagattgagatggacgatgaagtccagctcaacatcatcgaccgcggtgtgggtgcagttacccagaccaacgtcacccttgcagctgcatccgacgctgtcatcatcgccttcaacgttcgcgctgaaggtaaggcaactgaggaagcaaacgcagaaggcgtcgatgttcgttactacacgatcatctaccgtgctatcgaagaggtcgaggcggccctcaagggcatgctcaagccaatctacgaagagcgcgttatcggacatgctgagatccgtgcgatcttcaaggcttcctctgtcggcctcatcgcaggttgcatggttgaagacggcaaggtgcgccgaaacgccacagtccgcattattcgcgacggcaacgtcatcgccgagaatgcaaagatcgtgtcccttcgccgtgagaaggacgatgccaccgaagtctctgcaggctacgagtgcggtatggttctgtcttacccagacatctccgtcgacgacaagatcgaggtctacgaaatggttgaggttccacgcgaagcttaagcatttccggctcggggcat

SEQ ID NO: 468 - protein, 576 aa, Corynebacterium glutamicum
ADAAALVQALFNLGEMVTATASVSDETLQLLGEEMNYKVQVVSPEDEDRELLESFDLQFGEDEGGEADLAKRPPVVTVMGHVDHGKTRLLDTIRKANVGSDEAGGITQGIGAYQVKVNVEDTERTITFLDTPGHEAFTAMRARGAKSTDIAVLVVAADDGVMPQTVEAINHAKAADVPIVVAVNKIDKPEASPEKIRGQLTEYGLIPEEYGGDTIFVDISAKQGLNIDELLASVCLTADAELDLVANPEMDAQGVAIEAHLDRGRGPVATVIVQRGTLRVGDSIVAGDTYGRVRRMVDEYGRDVEEAGPSRPVQVQGLNGVPGAGDNLLVVEDDRIARQIANQRNARKRNALAARSRKRVSLEDLDSVLKEHSTLNLILKGDNAGSVEALEEALLKIEMDDEVQLNIIDRGVGAVTQTNVTLAAASDAVIIAFNVRAEGKATEEANAEGVDVRYYTIIYRAIEEVEAALKGMLKPIYEERVIGHAEIRAIFKASSVGLIAGCMVEDGKVRRNATVRIIRDGNVIAENAKIVSLRREKDDATEVSAGYECGMVLSYPDISVDDKIEVYEMVEVPREA

SEQ ID NO: 469 - DNA, 339 bp, Corynebacterium glutamicum
  CDS (101)..(316): RXA00677
cctatatcgatggtgtgcgtacatcttgagtgacgcaaccattttgaagtggaaaaacttaaggcctcccgcaggggagtgttctggaaaagcggaggatatggctaaggaaggcgctattgaagttgagggtcgcattgtcgaacctctgccgaatgcaatgttccgagtcgagctcgacaacggacacaaggtactcgcccacatcagtggaaagatgcgccagcactacatccgtatccttcctgaggaccgcgtcgttgtagagctgtcgccctatgatctgactcgtggacgaatcgtttaccgctacaagtaaaaataagctttaagcctcca

SEQ ID NO: 470 - protein, 72 aa, Corynebacterium glutamicum
MAKEGAIEVEGRIVEPLPNAMFRVELDNGHKVLAHISGKMRQHYIRILPEDRVVVELSPYDLTRGRIVYRYK

SEQ ID NO: 471 - DNA, 667 bp, Corynebacterium glutamicum
  CDS (101)..(667): RXN01284
atctgtgtgctcagtcttccaggctgcttatcacagtgaaagcaaaaccaattcgtggctgcgaaagtcgtagccaccacgaagtccaggaggacatacagtggcaaaggcgaagttcgagcgtaccaagccccacgtaaacatcggcaccatcggtcacgttgaccacggtaagaccaccaccaccgcggctatcaccaaggttctggctgacacttaccctgagctcaacgaggctttcgccttcgactccatcgataaggctcctgaggagaaggagcgtggcatcacgatcaacatctcccacgttgagtaccagactgaaaagcgccactacgcacacgttgacgctccaggccacgccgactacatcaagaacatgattaccggcgctgctcagatggacggcgcaatcctcgttgttgctgctaccgacggcccaatgcctcagacccgtgagcacgttcttcttgctcgccaggttggcgttccttacatcctcgttgctcttaacaagtgcgacatggttgaggatgaggaaatcatcgagctcgtcgagatggaagttcgtgaacttcttgctgagcaggactacgacgaagaggctccaattgttcacatctccgctctgaaggctcttgagggcgacgagaagtggggcaagcag

SEQ ID NO: 472 - protein, 189 aa, Corynebacterium glutamicum
VAKAKFERTKPHVNIGTIGHVDHGKTTTTAAITKVLADTYPELNEAFAFDSIDKAPEEKERGITINISHVEYQTEKRHYAHVDAPGHADYIKNMITGAAQMDGAILVVAATDGPMPQTREHVLLARQVGVPYILVALNKCDMVEDEEIIELVEMEVRELLAEQDYDEEAPIVHISALKALEGDEKWGKQ

SEQ ID NO: 473 - DNA, 507 bp, Corynebacterium glutamicum
  CDS (1)..(507): FRXA01284
gttgaccacggtaagaccaccaccaccgcggctatcaccaaggttctggctgacacttaccctgagctcaaccaggctttcgccttcgactccatcgataaggctcctgaggagaaggagcgtggcatcacgatcaacatctcccacgttgagtaccagactgaaaagcgccactacgcacacgttgacgctccaggccacgccgactacatcaagaacatgattaccggcgctgctcagatggacggcgcaatcctcgttgttgctgctaccgacggcccaatgcctcagacccgtgagcacgttcttcttgctcgccaggttggcgttccttacatcctcgttgctcttaacaagtgcgacatggttgaggatgaggaaatcatcgagctcgtcgagatggaagttcgtgaacttcttgctgagcaggactacgacgaagaggctccaattgttcacatctccgctctgaaggctcttgagggcgacgagaagtggggcaagcag

SEQ ID NO: 474 - protein, 169 aa, Corynebacterium glutamicum
VDHGKTTTTAAITKVLADTYPELNQAFAFDSIDKAPEEKERGITINISHVEYQTEKRHYAHVDAPGHADYIKNMITGAAQMDGAILVVAATDGPMPQTREHVLLARQVGVPYILVALNKCDMVEDEEIIELVEMEVRELLAEQDYDEEAPIVHISALKALEGDEKWGKQ

SEQ ID NO: 475 - DNA, 684 bp, Corynebacterium glutamicum
  CDS (101)..(661): RXA00138
cctcatcgtggtgtaatctaggtgagctaatcggtctgcgcgtttttcaagcactttgcgcagacccccatccacgtaatccacgagggagatcacatccgtggcaactaccgctgatttcaagaacggtctagttctcaagaacgaaggcaagctgcagcagatcatcgagttccagcacgtcaagccaggcaagggcccagcattcgtgcgaaccaaactcaaggacgtcgtgaccggcaagaccatcgacaagacctggaacgcaggcgtcaaggttgaaaccgcaaccgtcgaccgccgcgatgtcacctatttgtacaacgacggcacttccttcatcgtcatggatgacaagactttcgagcagtacgagctgtccccagacgcattcggcgacgctggccgcttcctacttgaaaacatgcgcgttcaggtctccttccacgaaggcgaggcactcttcggcgaactcccagtatctgtcgacctccgcgtcgagcacaccgatccaggcctgcagggcgaccgctccaccggcggcaccaagccagcaaccctcgagaccggcgctgaaatccaggtcccactgttcatcgagaccggaaacgtactcaaggtagacacccgcgacggttcctacctctcccgcgttaacaactaagattcttaaaacctttaaga

SEQ ID NO: 476 - protein, 187 aa, Corynebacterium glutamicum
VATTADFKNGLVLKNEGKLQQIIEFQHVKPGKGPAFVRTKLKDVVTGKTIDKTWNAGVKVETATVDRRDVTYLYNDGTSFIVMDDKTFEQYELSPDAFGDAGRFLLENMRVQVSFHEGEALFGELPVSVDLRVEHTDPGLQGDRSTGGTKPATLETGAEIQVPLFIETGNVLKVDTRDGSYLSRVNN

SEQ ID NO: 477 - DNA, 480 bp, Corynebacterium glutamicum
  CDS (101)..(457): RXA00331
cagcgccgaccagcaagcgaagtactgacccagatttacgaagaagtgctcccccacctctaaaatgcctgttccggcacttcccttcggggaaacagctatggttggccacatgtcgaatgatcacccatactcccccgcaaaacgcgtcggaaatttcatcttcgtctccggcgctctttcagtagacaaggactaccaaccagtcgtcggtcgtaaagaagcagttgatgcagcacttgaacgcatgcgtgaacgcctcgccaccgctggtggtgaactcaaagacgttgtgaaactcacttactttgtcaccgacatcagcctgcgcgaagaatgcaacgagcaattccgagagcatttcctcgaaggccgcccggcacgctctttcgtgggtgcatcatcgcttccttatggtgcaactgtggaaattgatgcgattgcgatgatcgaggactaaccagagcatttttcgcacga

SEQ ID NO: 478 - protein, 119 aa, Corynebacterium glutamicum
MVGHMSNDHPYSPAKRVGNFIFVSGALSVDKDYQPVVGRKEAVDAALERMRERLATAGGELKDVVKLTYFVTDISLREECNEQFREHFLEGRPARSFVGASSLPYGATVEIDAIAMIED

SEQ ID NO: 479 - DNA, 570 bp, Corynebacterium glutamicum
  CDS (1)..(570): RXA02822
ggtaccgaggttagccatcccgcccatggtgcgtggagccagttcaagtttgaaggtggcgtgcaccgtgttcagcgtgtgcctgttactgaatctcagggacgcatccagacctctgctgctggtgtcttggtttacccagaaccagatgaggtggaaaacgttgagatcgatgagaaggatattcgcgtcgatgtgtaccgttcctcaggtaagggtggtcagggcgttaacaccactgactccgctgtgcgtattacccacttgccaactggtttggtggtgacctgtcagaaggagcgctcccagattcagaaccgtgcgcgtgcgatgcaggttttggctgcccgtttacaggcgatgaaggaagaggaagcggcggctgaggctgctacgggacgtgctgcgcagattcgcaccatggaccgctctgagcgcatccgtacctacaactggccggaaaaccgcatcagcgatcaccgtattggttttaaggcgaacaaccttgattcggttctcgatggtgaattggatgatctgttcaccgcgttgcaggctgctgagcgtgca

SEQ ID NO: 480 - protein, 190 aa, Corynebacterium glutamicum
GTEVSHPAHGAWSQFKFEGGVHRVQRVPVTESQGRIQTSAAGVLVYPEPDEVENVEIDEKDIRVDVYRSSGKGGQGVNTTDSAVRITHLPTGLVVTCQKERSQIQNRARAMQVLAARLQAMKEEEAAAEAATGRAAQIRTMDRSERIRTYNWPENRISDHRIGFKANNLDSVLDGELDDLFTALQAAERA

SEQ ID NO: 481 - DNA, 480 bp, Corynebacterium glutamicum
  CDS (101)..(457): RXA00011
gaagttcttcccgtggtggaaaaagtggactccatcgacatccctgatgccgatgttcgcgtcgatgtctaccgctcctccggcccaggtggtcagtccagtgaacaccaccgactctgccgtgcgcctgacccacatcccaaccggcatcgtggtgacctgccaaaacgagaaatcacagatccaaaacaaggcatccgcgatgcgtgttctccaggcaaaactgcttgagcgtaaacgccaggaagaacgcgccgaaatggatgccctcggagctggaggcaatgcatcctggggtaaccaaatgcgttcctacgtgctgcacccttatcaaatggtgaaggatctgcgcaccaactttgaagtcaacgatccgcaaaaagtccttgacggcgatatcgatggccttttggaagcaggtattcgctggcgaatggctgagagccagtcggcggaataaaggttggttttctggcagaa

SEQ ID NO: 482 - protein, 119 aa, Corynebacterium glutamicum
VNTTDSAVRLTHIPTGIVVTCQNEKSQIQNKASAMRVLQAKLLERKRQEERAEMDALGAGGNASWGNQMRSYVLHPYQMVKDLRTNFEVNDPQKVLDGDIDGLLEAGIRWRMAESQSAE

SEQ ID NO: 483 - DNA, 999 bp, Corynebacterium glutamicum
  CDS (101)..(976): RXA00012
ctggattagtcatgccttccattgtgcatgccgtcggccaagtgtgctgaataaggtggcgttctaagaatcacaatcggtgcgggtaatatgtgcaatcatgcgtcccgaattttctgcagaactctccgagctagacagcacgctgacaaccattgaaaaagtgctgaacccgcaagagatgtctgaccgagtcagagaacttgaagctcaagcagctgacccgtctctgtgggatgaccctgaccatgcacagcaagtcacctctgagctgtcccacgtccaggcggagctgcgcaaaattaccgatctgcgccagcgcatcgaagatctgcccatcatggtggaactcgcagaggaagaagacggcgatacctccatcgcggaagaagaactcgccgatctgcgttctctgatcgatgcgttggaagtaaagaccatgctgtcgggtgaatatgatgctcgcgaggcagtgatcaatattcgatccggtgccggtggtgtcgatgctgcggactgggctgaaatgctcatgcgcatgtacacccgctgggcggaaaagaacggccacaaagtagatatttacgatatttcctacgccgaagaagccggcatcaaatccgccaccttcgtggtccacggcgactacatgtacggccagctctccgtggagcaaggcgcacaccgcctcgtgcgcatcagtccttttgataaccagggcaggcgccaaacctccttcgccgaggtagaagttcttcccgtggtggaaaaagtggactccatcgacatccctgatgccgatgttcgcgtcgatgtctaccgctcctccggcccaggtggtcagtccagtgaacaccaccgactctgccgtgcgcctgacccacatcccaaccggcatcgtggtgacctgccaaaacgagaaatcacagatccaaaacaaggcatccgcgatgcgtgttctccaggcaaaactgcttgagcgtaaacgccaggaagaac

SEQ ID NO: 484 - protein, 292 aa, Corynebacterium glutamicum
MRPEFSAELSELDSTLTTIEKVLNPQEMSDRVRELEAQAADPSLWDDPDHAQQVTSELSHVQAELRKITDLRQRIEDLPIMVELAEEEDGDTSIAEEELADLRSLIDALEVKTMLSGEYDAREAVINIRSGAGGVDAADWAEMLMRMYTRWAEKNGHKVDIYDISYAEEAGIKSATFVVHGDYMYGQLSVEQGAHRLVRISPFDNQGRRQTSFAEVEVLPVVEKVDSIDIPDADVRVDVYRSSGPGGQSSEHHRLCRAPDPHPNRHRGDLPKREITDPKQGIRDACSPGKTA

SEQ ID NO: 485 - DNA, 741 bp, Corynebacterium glutamicum
  CDS (1)..(741): RXN01926
ctgcgaagcttctacaccccagaacaagccatcgaacgcgaaggcgacgtctggaaagccgccaccgaagaagcagaactcctcgcagctgacggcgccgtccacgaccaggaactcttcctcaactgcaccacctccccactgatcttcgcctccgcgatgctcaacttcggcgtccaccaaatcctggacaccctctgccaactcgcaccatcccccgccggccgcgacgcagaccccaaagccctcgaagccgccacctccgcaatggacgaccaccgcgacaccaccgacgacttctccggcgtcgtcttcaaagtccaagccggcatggacaaaaaccaccgcgataccctcgccttcatgcgcgtcgtctccggcgaattcgaccgcggcatgcaagtcacccactcccaatccggccgcagcttctccaccaaatacgccctcaccgtcttcggccgcacccgctctaccgtcgaaaccgccttccccggcgacatcgtcggcctcgtcaacgccggcgccctcgcaccaggcgacaccatcttcgaaggccgaaaaatccaatacccaccaatgccaaaattcgcgccagaacacttccgcatcctgcgcgccaaatcactcggcaaatacaaacagttccgcaaagccctcgagcagctggactccgaaggtgtcgtccagatcctcaagaacgacctgcgtggcgacgccaacccaggtcatggccggtgt

SEQ ID NO: 486 - protein, 247 aa, Corynebacterium glutamicum
LRSFYTPEQAIEREGDVWKAATEEAELLAADGAVHDQELFLNCTTSPLIFASAMLNFGVHQILDTLCQLAPSPAGRDADPKALEAATSAMDDHRDTTDDFSGVVFKVQAGMDKNHRDTLAFMRVVSGEFDRGMQVTHSQSGRSFSTKYALTVFGRTRSTVETAFPGDIVGLVNAGALAPGDTIFEGRKIQYPPMPKFAPEHFRILRAKSLGKYKQFRKALEQLDSEGVVQILKNDLRGDANPGHGRC

SEQ ID NO: 487 - DNA, 672 bp, Corynebacterium glutamicum
  CDS (1)..(672): FRXA01926
ctgcgaagcttctacaccccagaacaagccatcgaacgcgaaggcgacgtctggaaagccgccaccgaagaagcagaactcctcgcagctgacggcgccgtccacgaccaggaactcttcctcaactgcaccacctccccactgatcttcgcctccgcgatgctcaacttcggcgtccaccaaatcctggacaccctctgccaactcgcaccatcccccgccggccgcgacgcagaccccaaagccctcgaagccgccacctccgcaatggacgaccaccgcgacaccaccgacgacttctccggcgtcgtcttcaaagtccaagccggcatggacaaaaaccaccgcgataccctcgccttcatgcgcgtcgtctccggcgaattcgaccgcggcatgcaagtcacccactcccaatccggccgcagcttctccaccaaatacgccctcaccgtcttcggccgcacccgctctaccgtcgaaaccgccttccccggcgacatcgtcggcctcgtcaacgccggcgccctcgcaccaggcgacaccatcttcgaaggccgaaaaatccaatacccaccaatgccaaaattcgcgccagaacacttccgcatcctgcgcgccaaatcactcggcaaatacaaacagttccgcaaagccctcgagcagctggac

SEQ ID NO: 488 - protein, 224 aa, Corynebacterium glutamicum
LRSFYTPEQAIEREGDVWKAATEEAELLAADGAVHDQELFLNCTTSPLIFASAMLNFGVHQILDTLCQLAPSPAGRDADPKALEAATSAMDDHRDTTDDFSGVVFKVQAGMDKNHRDTLAFMRVVSGEFDRGMQVTHSQSGRSFSTKYALTVFGRTRSTVETAFPGDIVGLVNAGALAPGDTIFEGRKIQYPPMPKFAPEHFRILRAKSLGKYKQFRKALEQLD

SEQ ID NO: 489 - DNA, 478 bp, Corynebacterium glutamicum
  CDS (101)..(478): RXN02002
aagtggcaaaaaacgtttcaagcaggcaacgccggcgtacaacttcgctgagctggggcgattatggcccagcgcccacaacccgctattcttaatacccatgagcaacgccaattccgacaccaccgccgccgaggcacatcgccgcagaacattcgccgtaatcgcacaccccgacgccggtaaatccaccctcaccgaggcattggcgctgcatgcacacatcatctccgaagccggcgccacccacggcaaagcaggccgcaaagccaccgtttccgactggatggaaatggaaaaagaccgcggcatctccatcgcctcctccgcactccaattcgagtacgcaccagaaggccacgcaggcgagcccttcatgatcaacctcgtggacaccccaggccacgccgacttctccgaagacacctaccgcgtcctcatggccgtcgacgcagcagtcatgcttatgcactccgtc

SEQ ID NO: 490 - protein, 126 aa, Corynebacterium glutamicum
MSNANSDTTAAEAHRRRTFAVIAHPDAGKSTLTEALALHAHIISEAGATHGKAGRKATVSDWMEMEKDRGISIASSALQFEYAPEGHAGEPFMINLVDTPGHADFSEDTYRVLMAVDAAVMLMHSV

SEQ ID NO: 491 - DNA, 394 bp, Corynebacterium glutamicum
  CDS (17)..(394): FRXA02002
gctattcttaatacccatgagcaacgccaatcccgacaccaccgccgccgaggcacatcgccgcagaacattcgccgtaatcgcacaccccgacgccggtaaatccaccctcaccgaggcattggcgctgcatgcacacatcatctccgaagccggcgccacccacggcaaagcaggccgcaaagccaccgtttccgactggatggaaatggaaaaagaccgcggcatctccatcgcctcctccgcactccaattcgagtacgcaccagaaggccacgcaggcgagcccttcatgatcaacctcgtggacaccccaggccacgccgacttctccgaagacacctaccgcgtcctcatggccgtcgacgcagcagtcatgcttatgcactccgtc

SEQ ID NO: 492 - protein, 126 aa, Corynebacterium glutamicum
MSNANPDTTAAEAHRRRTFAVIAHPDAGKSTLTEALALHAHIISEAGATHGKAGRKATVSDWMEMEKDRGISIASSALQFEYAPEGHAGEPFMINLVDTPGHADFSEDTYRVLMAVDAAVMLMHSV

SEQ ID NO: 493 - DNA, 739 bp, Corynebacterium glutamicum
  CDS (101)..(739): RXA00896
cgcgaatggcttcctctttagccccgattgcgtggggtgcgtgagcctcaaactcgaggagggttaaatcatctgcggaaagcatgcttagaatgttgccatgactgtccgaccaatcgttattcatggagatcctgttctccacaaccctacccagcttgttactgaggatgtctctgaactgcaggaactaattgcagatatgtacgagacgatggatgtcgccaatggtgtgggtcttgcggccaaccagattggtgtgtccaagcgcatttttgtttatgactgtcctgatgatgagggcgtgatgcacaagggttgtttcatcaatcctgtgttggaaacctctgaaatcccagagaccatgcctgccgatgatggctccgacgaggaaggctgcctgtctgttcctggcgagggcttccccactggccgtgctcattgggcgaaggttactggactgaatgaaaagggcgaggaagtttctgttgaggctgagggtttcttggctcgttgcttccagcatgaggttggccaccttgatggtttcttgtacaccgatgtgttgattggtcggtggaagcgcatggctaagaaggctattaaggccaatgggtggactgagcctggtttgacctggatgccgggtgaagatgaggatcctttcgggcatgacgcctatgtcttccccgtttccgcagccagaaacctgccgtcggcgatcgtgttgttgcacgtc

SEQ ID NO: 494 - protein, 213 aa, Corynebacterium glutamicum
MTVRPIVIHGDPVLHNPTQLVTEDVSELQELIADMYETMDVANGVGLAANQIGVSKRIFVYDCPDDEGVMHKGCFINPVLETSEIPETMPADDGSDEEGCLSVPGEGFPTGRAHWAKVTGLNEKGEEVSVEAEGFLARCFQHEVGHLDGFLYTDVLIGRWKRMAKKAIKANGWTEPGLTWMPGEDEDPFGHDAYVFPVSAARNLPSAIVLLHV

SEQ ID NO: 495 - DNA, 630 bp, Corynebacterium glutamicum
  CDS (101)..(607): RXA02242
gtgaaaggcctaatggggtcgtgtcccatgtgggatataagatggggagacaagatcatccacccataggaattattgttgaaggagccttcccacaaccatggcagttcgtgaagtcagattatttggagatcccgtacttgtgagtcgggcagatgaggtcgtggacttcgatgaatcactgtccaccctgatcgatgacatgtttgacaccatggaagatgccggtggcgttggtctagcagcaaaccaggtgggtgttttaaggcgcgtgttcgtgtttgatacctcccaccaggagggtggattgcgcggacatgtgatcaacccggtgtgggagcctctcactgaggacacccagactggcaaagagggctgtttgtccatccctgatgtctcggctgagaccacccgctatgaaacggttcggctgtctggccaggaccgcgacggcaatccagtggggtttgtggccaatggattgttggccaggtgcatccaacacgaaactgatcaccttgatggcgtgctgtttttgaagcgccttgatccagctgaacgtaaagcagccatgggcgttattcgcgcgtctgcatggtttaacaaataatgagtggaaagggcacttca

SEQ ID NO: 496 - protein, 169 aa, Corynebacterium glutamicum
MAVREVRLFGDPVLVSRADEVVDFDESLSTLIDDMFDTMEDAGGVGLAANQVGVLRRVFVFDTSHQEGGLRGHVINPVWEPLTEDTQTGKEGCLSIPDVSAETTRYETVRLSGQDRDGNPVGFVANGLLARCIQHETDHLDGVLFLKRLDPAERKAAMGVIRASAWFNK

SEQ ID NO: 497 - DNA, 552 bp, Corynebacterium glutamicum
  CDS (101)..(529): RXS02308
gggtgagattggaatgatttcggcccgggcgctcgaaaaccgtgatagacacaatgaaccgagcaaatccgccaggaaataaattaagtaaggaatatccatgagtgaaacccagtcgaattcagtgtcagcggtaatgcctgcgcagctccctccagggcctgccgagcgtactgtgtactcctacggtgttcgcgcaggggatcaggtgcacattttaagaatggaggcttttgattctgacgcgaatattgtcggcgaaagggacattgaggcgcatgctgaacaagtctttaagaacctgcaagcagtaatccacgaggcaggaggaacgatcaacaacattgtttccaccactacttatcttgccgatgtcaccgatgctcccgttgttaacgctgctcgctcccgctatttcaccggagaagtattgcccacccacaccgtaattggagttgctgctcttgctcggccacagtttctagtcgagatctcagcggtggcctatttgggggacctttcaaaagactagatacatgattatttttgcat

SEQ ID NO: 498 - protein, 143 aa, Corynebacterium glutamicum
MSETQSNSVSAVMPAQLPPGPAERTVYSYGVRAGDQVHILRMEAFDSDANIVGERDIEAHAEQVFKNLQAVIHEAGGTINNIVSTTTYLADVTDAPVVNAARSRYFTGEVLPTHTVIGVAALARPQFLVEISAVAYLGDLSKD

SEQ ID NO: 499 - DNA, 531 bp, Corynebacterium glutamicum
  CDS (101)..(508): RXA01710
tctcggcgctaatctggtttattggtgatatccgagccaagggaactccgagctcacccattaccactgatccaacgcacgaccatcttgagaggacagcatgacagacttcaaactcatcagcgataccgagtggcgcgaacgcctcaccccgcaggaattccatgtcctccgcgaagccggcaccgaaccacctcacgtcggtgaatacaccaacaccaccaccgaaggtgtgtactcctgtcgcgcctgtggtgaagagttattccgctccaccgagaagtttgaatcccactgcggttggccttccttcttctccccacttgctggcgacaaaatcattgagaaggaagatctttccctcggtatgcgtcgcgttgagattctgtgcgctaactgcggctctcacatgggtcacgtcttcgaaggcgaaggctacgacacccccaccgatcttcgttactgcattaactccatcagcttgaagctggaagaaaagccagtttcctaagcttccgagcacgaaacgag

SEQ ID NO: 500 - protein, 136 aa, Corynebacterium glutamicum
MTDFKLISDTEWRERLTPQEFHVLREAGTEPPHVGEYTNTTTEGVYSCRACGEELFRSTEKFESHCGWPSFFSPLAGDKIIEKEDLSLGMRRVEILCANCGSHMGHVFEGEGYDTPTDLRYCINSISLKLEEKPVS

SEQ ID NO: 501 - DNA, 1941 bp, Corynebacterium glutamicum
  CDS (101)..(1918): RXN02462
tccatcctcatcgacgaagcccgcaccccactgattatctccgggaccagtagacggcacatcgcagttctacaacgtcttcgcacagatcgtcccacgcatgaccaaggacgttcactacgaagtcgacgaacgtaaaaagaccgtcggtgtgaaagaagaaggcgtcgaatacgtcgaagaccaactcggcatcgacaacctctacgcacctgagcactcacagctggtcagctacctgaacaacgccatcaaggcacaggaactgttcacccgcgacaaggactacatcgtccgcaacggcgaagttatgatcgtcgacggcttcaccggccgtgtccttgccggccgccgatacaacgaaggcatgcaccaggcgatcgaagccaaagagcgcgtagagatcaaaaacgagaaccagaccctggcgaccgttaccctccagaactacttccgcctctacaccaaactcgccggcatgaccggtaccgcagagaccgaagcagcagagctcaaccagatctacaagctcgacgtcatcgcgatcccaaccaaccgaccaaaccagcgcgaagacttgaccgacttggtgtacaaaacccaagaggctaagttcgcagcagtcgtcgacgacatcgcagaacgcaccgaaaagggccaaccagtcctcgtcggtaccgtctccgtcgagcgctccgaatacctctcccagctgttgaccaaacgaggcatcaagcacaacgtcctcaatgcgaagcaccacgagcaggaagcacagatcgttgctcaggcaggtcttccaggcgccgtcaccgttgccaccaacatggcgggccgtggaaccgacatcgtgctcggcggaaacccagaaatcctcctcgacatcaaactccgcgaacgtggacttgatcctttcgaagacgaagaaagctaccaggaagcctgggacgctgaacttccagcaatgaagcagcgatgcgaagaacgtggcgacaaagtccgcgaagccggaggactctacgtccttggcaccgaacgccacgaatcccgacgcatcgacaaccagctgcgcggtcgttctgcacgtcagggcgacccaggatccacccgcttctatctctctatgcgcgacgacctgatggttcgcttcgtcggcccaaccatggaaaacatgatgaacaggctcaacgtcccagacgatgtgcccatcgaatccaaaaccgtcaccaactccatcaagggcgcccaagctcaggtggagaaccagaacttcgaaatgcgtaagaacgttctgaagtacgacgaagtcatgaacgaacagcgcaaggttatctacagcgagcgacgcgaaatcctcgaatccgcagacatctcccgctacatccaaaacatgatcgaagaaacagtcagcgcatacgtcgacggcgccaccgccaacggctacgtcgaagactgggacctcgacaaactctggaacgccctcgaagccctctacgacccatcgatcaactggaccgacctcgtcgaaggcagcgaatacggcaaaccaggggagctgtccgccgaagatctacgcaccgcactcgtcaacgacgcccacgccgaatacgcaaaactcgaagaagccgtatccgcaatcggcggcgaagcacagatccgcaacatcgaacgaatggtgctcatgccagtcatcgacaccaaatggcgcgaacacctctacgaaatggactacctgaaagaaggcatcggcctgcgcgcaatggcacagcgcgacccactggtcgaataccaaaaggaaggcggcgacatgttcaacggcatgaaagacggcatcaaggaagaaaccgtccgccagctcttcctctccgcaagcagttcatcaagcaagacgcggaagtcgctgactaactcagaaccctgaaattcagcatccgccacatg

SEQ ID NO: 502 - protein, 606 aa, Corynebacterium glutamicum
MTKDVHYEVDERKKTVGVKEEGVEYVEDQLGIDNLYAPEHSQLVSYLNNAIKAQELFTRDKDYIVRNGEVMIVDGFTGRVLAGRRYNEGMHQAIEAKERVEIKNENQTLATVTLQNYFRLYTKLAGMTGTAETEAAELNQIYKLDVIAIPTNRPNQREDLTDLVYKTQEAKFAAVVDDIAERTEKGQPVLVGTVSVERSEYLSQLLTKRGIKHNVLNAKHHEQEAQIVAQAGLPGAVTVATNMAGRGTDIVLGGNPEILLDIKLRERGLDPFEDEESYQEAWDAELPAMKQRCEERGDKVREAGGLYVLGTERHESRRIDNQLRGRSARQGDPGSTRFYLSMRDDLMVRFVGPTMENMMNRLNVPDDVPIESKTVTNSIKGAQAQVENQNFEMRKNVLKYDEVMNEQRKVIYSERREILESADISRYIQNMIEETVSAYVDGATANGYVEDWDLDKLWNALEALYDPSINWTDLVEGSEYGKPGELSAEDLRTALVNDAHAEYAKLEEAVSAIGGEAQIRNIERMVLMPVIDTKWREHLYEMDYLKEGIGLRAMAQRDPLVEYQKEGGDMFNGMKDGIKEETVRQLFLSASSSSSKTRKSLTNSEP

SEQ ID NO: 503 - DNA, 832 bp, Corynebacterium glutamicum
  CDS (101)..(832): FRXA00124
tccatcctcatcgacgaagcccgcaccccactgattatctccgggaccagtagacggcacatcgcagttctacaacgtcttcgcacagatcgtcccacgcatgaccaaggacgttcactacgaagtcgacgaacgtaaaaagaccgtcggtgtgaaagaagaaggcgtcgaatacgtcgaagaccaactcggcatcgacaacctctacgcacctgagcactcacagctggtcagctacctgaacaacgccatcaaggcacaggaactgttcacccgcgacaaggactacatcgtccgcaacggcgaagttatgatcgtcgacggcttcaccggccgtgtccttgccggccgccgatacaacgaaggcatgcaccaggcgatcgaagccaaagagcgcgtagagatcaaaaacgagaaccagaccctggcgaccgttaccctccagaactacttccgcctctacaccaaactcgccggcatgaccggtaccgcagagaccgaagcagcagagctcaaccagatctacaagctcgacgtcatcgcgatcccaaccaaccgaccaaaccagcgcgaagacttgaccgacttggtgtacaaaacccaagaggctaagttcgcagcagtcgtcgacgacatcgcagaacgcaccgaaaagggccaaccagtcctcgtcggtaccgtctccgtcgagcgctccgaatacctctcccagctgttgaccaaacgaggcatcaagcacaacgtcctcaatgcgaagcaccacgagcaggaagcacagatcgttgctcaggcaggtcttccaggcgccgtcaccgttgccaccaacatggcg

SEQ ID NO: 504 - protein, 244 aa, Corynebacterium glutamicum
MTKDVHYEVDERKKTVGVKEEGVEYVEDQLGIDNLYAPEHSQLVSYLNNAIKAQELFTRDKDYIVRNGEVMIVDGFTGRVLAGRRYNEGMHQAIEAKERVEIKNENQTLATVTLQNYFRLYTKLAGMTGTAETEAAELNQIYKLDVIAIPTNRPNQREDLTDLVYKTQEAKFAAVVDDIAERTEKGQPVLVGTVSVERSEYLSQLLTKRGIKHNVLNAKHHEQEAQIVAQAGLPGAVTVATNMA

SEQ ID NO: 505 - DNA, 938 bp, Corynebacterium glutamicum
  CDS (1)..(915): FRXA02462
gaagccggaggactctacgtccttggcaccgaacgccacgaatcccgacgcatcgacaaccagctgcgcggtcgttctgcacgtcagggcgacccaggatccacccgcttctatctctctatgcgcgacgacctgatggttcgcttcgtcggcccaaccatggaaaacatgatgaacaggctcaacgtcccagacgatgtgcccatcgaatccaaaaccgtcaccaactccatcaagggcgcccaagctcaggtggagaaccagaacttcgaaatgcgtaagaacgttctgaagtacgacgaagtcatgaacgaacagcgcaaggttatctacagcgagcgacgcgaaatcctcgaatccgcagacatctcccgctacatccaaaacatgatcgaagaaacagtcagcgcatacgtcgacggcgccaccgccaacggctacgtcgaagactgggacctcgacaaactctggaacgccctcgaagccctctacgacccatcgatcaactggaccgacctcgtcgaaggcagcgaatacggcaaaccaggggagctgtccgccgaagatctacgcaccgcactcgtcaacgacgcccacgccgaatacgcaaaactcgaagaagccgtatccgcaatcggcggcgaagcacagatccgcaacatcgaacgaatggtgctcatgccagtcatcgacaccaaatggcgcgaacacctctacgaaatggactacctgaaagaaggcatcggcctgcgcgcaatggcacagcgcgacccactggtcgaataccaaaaggaaggcggcgacatgttcaacggcatgaaagacggcatcaaggaagaaaccgtccgccagctcttcctctccgcaagcagttcatcaagcaagacgcggaagtcgctgactaactcagaaccctgaaattcagcatccgccacatg

SEQ ID NO: 506 - protein, 305 aa, Corynebacterium glutamicum
EAGGLYVLGTERHESRRIDNQLRGRSARQGDPGSTRFYLSMRDDLMVRFVGPTMENMMNRLNVPDDVPIESKTVTNSIKGAQAQVENQNFEMRKNVLKYDEVMNEQRKVIYSERREILESADISRYIQNMIEETVSAYVDGATANGYVEDWDLDKLWNALEALYDPSINWTDLVEGSEYGKPGELSAEDLRTALVNDAHAEYAKLEEAVSAIGGEAQIRNIERMVLMPVIDTKWREHLYEMDYLKEGIGLRAMAQRDPLVEYQKEGGDMFNGMKDGIKEETVRQLFLSASSSSSKTRKSLTNSEP

SEQ ID NO: 507 - DNA, 888 bp, Corynebacterium glutamicum
  CDS (101)..(865): RXA00125
cgggtactgtgttttaggaaccgtgcgtagttttaggaacagtgcgtacaatataggttcgttatcatttccgtatcgctatttataaggacgactgctcgtgtttggattgtccaaggtgctccgcgtcggcgaaggccgtgccgtgaagcgacttcacaagatcgctgaccaggttatcgcgcttgaagataagttcgccaacctaaccgatgaggagctcaaggcaaaaacagccgagttcaaagaacgcatcgctggcggtgaaggactcgacgaaatcttcctcgaagcgttcgcaacagcccgtgaagcagcttggcgtgtgctcggccagaagcactaccatgtacaaatcatgggtggcgcagcgctgcactttggcaacgtcgccgaaatgcgcaccggcgaaggcaaaaccctcacctgcgtgcttccagcatatttgaacgcacttgaaggaaaaggcgtccacgttgtcaccgtcaatgattacctagcaaaacgtgacgcagaaatgatgggccgtgtgcaccgctacttaggcctcgaagtgggagtaatcctctctgacatgcgcccagacgagcgccgcgaagcctacgctgccgacattacctacggcaccaacaacgaactcggcttcgactacctgcgcgacaacatggcacgctccctaagcgacctcgtgcagcgtggacacaactacgccattgtcgacgaagtagactccatcctcatcgacgaagcccgcaccccactgattatctccgggaccagtagacggcacatcgcagttctacaacgtcttcgcacagatcgtcccacgcatgaccaaggacgttcactacgaagtcgacgaacgtaaaaagaccgtcggtgtgaaag

SEQ ID NO: 508 - protein, 255 aa, Corynebacterium glutamicum
VFGLSKVLRVGEGRAVKRLHKIADQVIALEDKFANLTDEELKAKTAEFKERIAGGEGLDEIFLEAFATAREAAWRVLGQKHYHVQIMGGAALHFGNVAEMRTGEGKTLTCVLPAYLNALEGKGVHVVTVNDYLAKRDAEMMGRVHRYLGLEVGVILSDMRPDERREAYAADITYGTNNELGFDYLRDNMARSLSDLVQRGHNYAIVDEVDSILIDEARTPLIISGTSRRHIAVLQRLRTDRPTHDQGRSLRSRRT

SEQ ID NO: 509 - DNA, 1443 bp, Corynebacterium glutamicum
  CDS (101)..(1420): RXA00687
ttgtaatcggaccaggatctaaagaacacatctcccggtaccttttagtcactattgtgaaaatatgtgggtttaagtgctgaggaggccaggaggataagtgtccgccattattcaggcattcaaggacgccgatctgcgtaagaagattttcttcactatcgcaatgatcgttctataccgcatcggtgcgcagatcccttccccgggagttgactacgcaacgattagtggtcgtctgcgtgacttgactcaggatcagtcaagcgtttattcgctgattaacctgttttccggtggagcgctgttgcagctgtccatttttgctattggtatcatgccgtacatcacggcgtctattatcgtgcagctgctgactgtggttattccacactttgaggagttgaagaaggaaggccagtctggccaggccaagatgatgcagtacaccaggtacttaacggttgctttggcgttgctgcagtcttcaggcattgtcgcgttggcggaccgtgagcagctgcttggcgcaggtattcgtgtgctgtcggctgatcgcaacttcttcgatctcattgttttggtcatcaccatgactgcaggtgcggtgcttgtgatgtggatgggtgagctcatcacggaaaagggcgtgggcaatggtatgtcgttgctgattttcgctggtatcgcaactcgcctcccaactgatggcatgaacattctgggtaactccggcggcgtggttttcgctgttgttctggcttccgttctgatcctggtcattggtgttgtattcgttgagcagggccagcgtcgtattccagtgcagtacgcaaagcgcatggtgggacgtcgccagtacggtggttcttccacttacctgccattgaaggtcaaccaagctggtgttatcccagtgatcttcgcgtcttcgctgatttacatgccagtgctgattactcagatcgtgaactctggttcgctggaagtgtctgataactggtggcagcgcaacatcattgcgcacctgcagacgccttcttcctggcagtacattgttttgtactttgcactgaccatcttcttctcttacttctatgtttccgttcagtatgatccagctgagcaggctgaaaacatgaagaagtacggtggatttatccctggtattcgtccgggccgcccgactgctgagtacttgggattcgtcatgaaccgcctgctgtttgttggttccctgtacctggctgtcattgctgtgctgccaaacattatgctggatctaggtgttgacgccggttcggccggagcaactccattcggcggaaccgcaatcttgattcttgtatctgttgcactgaccacagtgaagcagattgagagccagctcctgcaaagcaactacgaaggacttctaaaataatgcgactcgtactcctcgga

SEQ ID NO: 510 - protein, 440 aa, Corynebacterium glutamicum
VSAIIQAFKDADLRKKIFFTIAMIVLYRIGAQIPSPGVDYATISGRLRDLTQDQSSVYSLINLFSGGALLQLSIFAIGIMPYITASIIVQLLTVVIPHFEELKKEGQSGQAKMMQYTRYLTVALALLQSSGIVALADREQLLGAGIRVLSADRNFFDLIVLVITMTAGAVLVMWMGELITEKGVGNGMSLLIFAGIATRLPTDGMNILGNSGGVVFAVVLASVLILVIGVVFVEQGQRRIPVQYAKRMVGRRQYGGSSTYLPLKVNQAGVIPVIFASSLIYMPVLITQIVNSGSLEVSDNWWQRNIIAHLQTPSSWQYIVLYFALTIFFSYFYVSVQYDPAEQAENMKKYGGFIPGIRPGRPTAEYLGFVMNRLLFVGSLYLAVIAVLPNIMLDLGVDAGSAGATPFGGTAILILVSVALTTVKQIESQLLQSNYEGLLK

SEQ ID NO: 511 - DNA, 354 bp, Corynebacterium glutamicum
  CDS (101)..(331): RXA02260
gccggctgggtagtactcgtgtatactgtctaaagttattcgaaatcaggtgggcataaggttcacctgggttctcaaacggcaaaggaacattttccacatggcattgacgcttcaaatcatcctcgtcgtcgccagcctgctcatgacggttttcgtcttgctgcacaagggcaaaggcggcggactctccagcctcttcggtggcggtgtgcagtccaatctttcgggctccactgttgttgaaaagaacctggatcgcgtcaccattttggttgccgttatctggattgtgtgcattgtcgcactcaacctcatccagacttattcataagacacgagcttaaaaagagc

SEQ ID NO: 512 - protein, 77 aa, Corynebacterium glutamicum
MALTLQIILVVASLLMTVFVLLHKGKGGGLSSLFGGGVQSNLSGSTVVEKNLDRVTILVAVIWIVCIVALNLIQTYS

SEQ ID NO: 513 - DNA, 819 bp, Corynebacterium glutamicum
  CDS (101)..(796): RXN00046
tggtgcccaagcagccgtcatcgcagcagcaaaatatgcccgcgataacgccttttaagcacctaaaacgctgttctcaacacaggagtttccttaaataatggacttaaatactcaacgctcaaagctctacgcacagcttcaaggccagctcattgtttccgtgcaagctcccgacggccatgccatgcgagatacccatacgctcacccatgtggccgcagcctgtgtcgatggcggtgctcctgccattcgctgtggcggttacggcggtttggaagatatccgttcaatctccaaccgtgtcgacgttcccgttttcggactcaccaaagaaggctccgaaggagtttacatcaccccaaccagggattccgttcgagcagtggcagaatccggcgccactgtagtctgcgcggatgcaactttccgacctaggcctgacggctccacctttgcagagctggtcactgttgcccacgattccggaattctcatcatggcggactgcgcaactcccgaagaagttctcagtgcgcataaggctggcgcggattttgtgtccaccacgcttgctggatacaccgaacaccgcgagaaaacagtcggtccagatttcgattgcctccgcgaagcacgtgagttagttcccgatgcgttcctcattggcgaaggtcgcttctccaaccctgcggatgtggcgcacggtcgtctcattggtgccaacgcgatcatcgtgggcaccgcaatcactgaccctggtttcatcactggacagttcgcgtcactgttgcactagcacttagtccagcgctgcac

SEQ ID NO: 514 - protein, 232 aa, Corynebacterium glutamicum
MDLNTQRSKLYAQLQGQLIVSVQAPDGHAMRDTHTLTHVAAACVDGGAPAIRCGGYGGLEDIRSISNRVDVPVFGLTKEGSEGVYITPTRDSVRAVAESGATVVCADATFRPRPDGSTFAELVTVAHDSGILIMADCATPEEVLSAHKAGADFVSTTLAGYTEHREKTVGPDFDCLREARELVPDAFLIGEGRFSNPADVAHGRLIGANAIIVGTAITDPGFITGQFASLLH

SEQ ID NO: 515 - DNA, 819 bp, Corynebacterium glutamicum
  CDS (101)..(796): FRXA00046
tggtgcccaagcagccgtcatcgcagcagcaaaatatgcccgcgataacgccttttaagcacctaaaacgctgttctcaacacaggagtttccttaaataatggacttaaatactcaacgctcaaagctctacgcacagcttcaaggccagctcattgtttccgtgcaagctcccgacggccatgccatgcgagatacccatacgctcacccatgtggccgcagcctgtgtcgatggcggtgctcctgccattcgctgtggcggttacggcggtttggaagatatccgttcaatctccaaccgtgtcgacgttcccgttttcggactcaccaaagaaggctccgaaggagtttacatcaccccaaccagggattccgttcgagcagtggcagaatccggcgccactgtagtctgcgcggatgcaactttccgacctaggcctgacggctccacctttgcagagctggtcactgttgcccacgattccggaattctcatcatggcggactgcgcaactcccgaagaagttctcagtgcgcataaggctggcgcggattttgtgtccaccacgcttgctggatacaccgaacaccgcgagaaaacagtcggtccagatttcgattgcctccgcgaagcacgtgagttagttcccgatgcgttcctcattggcgaaggtcgcttctccaaccctgcggatgtggcgcacggtcgtctcattggtgccaacgcgatcatcgtgggcaccggaatcactgaccctggtttcatcactggacagttcgcgtcactgttgcactaacacttagtccaacgctgcac

SEQ ID NO: 516 - protein, 232 aa, Corynebacterium glutamicum
MDLNTQRSKLYAQLQGQLIVSVQAPDGHAMRDTHTLTHVAAACVDGGAPAIRCGGYGGLEDIRSISNRVDVPVFGLTKEGSEGVYITPTRDSVRAVAESGATVVCADATFRPRPDGSTFAELVTVAHDSGILIMADCATPEEVLSAHKAGADFVSTTLAGYTEHREKTVGPDFDCLREARELVPDAFLIGEGRFSNPADVAHGRLIGANAIIVGTGITDPGFITGQFASLLH

SEQ ID NO: 517 - DNA, 1445 bp, Corynebacterium glutamicum
  CDS (1)..(1422): RXA00753
gttgttgatggggttggtggctacaccgagcaagaagtcgccgagattcatgaggctatccgtcaagcccaagactctggtgcacctaatgatgaacttattcctggtgagatgtggtcagataaggtcgagttaccctcaacgattgataaagcagctgctgatgaagctgagatagctattgcacagcaacagtcccaaccccaggcgagaggactagccgctgctgcagcgtgtcagacattttggccgtcaccttatcaagtttgtggtgctatcttagagcgctatatccagcagggtgcccagtttgggtggatgttgttgcttactgaaggccaagcgcttaaccctgatggtcagggatatcgtcagcggtttatgaatgggtttatctattggcatccttctactggtgcgcacgcggttaataattacagtgcacaagtctgggagcgtaacggttgggagtctgggtggatggggtatcccactggtggtgaagtccctgtgtctgggtctaatccgattgatggtgagttgagtgggtgggtgcaaaccttccaaggtgggcgagtgtatcgcagtccggtattggacggtttccaggtggccagtattaatgggctgatcttggataaatggcttgaattgggtggtcctgatagtgaccttggttttcccattgcggatgaggctgtgacagctgacggtgtgggtagattttctgttttccagaacggagttgtctactggcatccgcaacacggagctcaccctatattagggaatatatacagtatctggagagaagaaggagctgagagtggggaattcggttaccctatcggcgatccagaaaagtatacagaaaacatggctaatcaggtattcgaaaaaggcgaacttgcagctaacctataccccaatcctcttgaggcttttattgagtttttaccctttgctaatcttgaggaagcaatagagtattttgagaacggattgtcaaattctcgtgtagaggcgaattcacttaacgccaagaaagattcgattcaatgtcaatcgcaatccgctaacattcatgtgagaacgaagagtgacggagtcgggattagggttccaaagattgggtttaaggctaggatggattgcgaccttcctggaactgtctcagatgtagtggggtatggatggatttactacgactattggggacgatgggctcaagcagcatatgcacaacaattcttcggtaataggaattctgttgtgcaaaccaatttagaggcgggttgcagcggggagaagaatacattattttggggtacttcatattttcaggtgacttatgaaggtcagccgtatttcggtcagtcagcaactaactacgcttatcttccgtgtacgatagaccgtagttaacataaggaatggaataggag

SEQ ID NO: 518 - protein, 474 aa, Corynebacterium glutamicum
VVDGVGGYTEQEVAEIHEAIRQAQDSGAPNDELIPGEMWSDKVELPSTIDKAAADEAEIAIAQQQSQPQARGLAAAAACQTFWPSPYQVCGAILERYIQQGAQFGWMLLLTEGQALNPDGQGYRQRFMNGFIYWHPSTGAHAVNNYSAQVWERNGWESGWMGYPTGGEVPVSGSNPIDGELSGWVQTFQGGRVYRSPVLDGFQVASINGLILDKWLELGGPDSDLGFPIADEAVTADGVGRFSVFQNGVVYWHPQHGAHPILGNIYSIWREEGAESGEFGYPIGDPEKYTENMANQVFEKGELAANLYPNPLEAFIEFLPFANLEEAIEYFENGLSNSRVEANSLNAKKDSIQCQSQSANIHVRTKSDGVGIRVPKIGFKARMDCDLPGTVSDVVGYGWIYYDYWGRWAQAAYAQQFFGNRNSVVQTNLEAGCSGEKNTLFWGTSYFQVTYEGQPYFGQSATNYAYLPCTIDRS

SEQ ID NO: 519 - DNA, 826 bp, Corynebacterium glutamicum
  CDS (101)..(826): RXN03038
gcgcggaaaacaccaagtaagccttacagtccgacagcctcatagcggatgggataagttccaaacacgttcaaatccgttaaagtgcctgtttaaaactatgcattcaaaggaagagttaacagtgcgtaaaggaatttcccgcgtcctctcggtagcggttgctagttcaatcggattcggaactgtactgacaggcaccggcatcgcagcagctcaagactctgcatttgactacggtatggatccaaacatgaactacaacccgatcgatgacatcaaggatcgtcccgaaggattgtccaatcttccctacttcggaagtaaattgaccagctggggctcatcatatgccaccgcctcatccggcgtcgtgacctccgcgctcccgcagtacaccgatccgcgctaccccctcggcaaagacgacctgcccaaggcaaccatcgacatggagccagaagttcttgcgcgccttgagcgattcgtcggcgttgacggtgatcgcatccgccaaatcaacgcgtactcgccatcaatgggacgcaccattcctctagtctgggttgttccagaagacaacaccgtgcctggcccaacggtctacgcactcggaggcggtgacggtggacaaggcggccagaactgggtcacccgcaccgaccttgaggaattaaccagtgacaacaacatcaacctcatcatgccgatgctcggatcttttagtttctactctgactgggcacgcgaaagccaatccatgggttgtgcgcaacagtgggaaacattgctcatgcacgaactgcctgagccgcttgtagcggcc

SEQ ID NO: 520 - protein, 242 aa, Corynebacterium glutamicum
MHSKEELTVRKGISRVLSVAVASSIGFGTVLTGTGIAAAQDSAFDYGMDPNMNYNPIDDIKDRPEGLSNLPYFGSKLTSWGSSYATASSGVVTSALPQYTDPRYPLGKDDLPKATIDMEPEVLARLERFVGVDGDRIRQINAYSPSMGRTIPLVWVVPEDNTVPGPTVYALGGGDGGQGGQNWVTRTDLEELTSDNNINLIMPMLGSFSFYSDWARESQSMGCAQQWETLLMHELPEPLVAA

SEQ ID NO: 521 - DNA, 613 bp, Corynebacterium glutamicum
  CDS (101)..(613): FRXA01179
gcgcggaaaacaccaagtaagccttacagtccgacagcctcatagcggatgggataagttccaaacacgttcaaatccgttaaagtgcctgtttaaaactatgcattcaaaggaagagttaacagtgcgtaaaggaatttcccgcgtcctctcggtagcggttgctagttcaatcggattcggaactgtactgacaggcaccggcatcgcagcagctcaagactctgcatttgactacggtatggatccaaacatgaactacaacccgatcgatgacatcaaggatcgtcccgaaggattgtccaatcttccctacttcggaagtaaattgaccagctggggctcatcatatgccaccgcctcatccggcgtcgtgacctccgcgctcccgcagtacaccgatccgcgctaccccctcggcaaagacgacctgcccaaggcaaccatcgacatggagccagaagttcttgcgcgccttgagcgattcgtcggcgttgacggtgatcgcatccgccaaatcaacgcgtactcgccatcaatgggacgcaccattcctctagtctgggttgttccaaaagacaacaccgtgccttgcccaacggtctacgcacta

SEQ ID NO: 522 - protein, 171 aa, Corynebacterium glutamicum
MHSKEELTVRKGISRVLSVAVASSIGFGTVLTGTGIAAAQDSAFDYGMDPNMNYNPIDDIKDRPEGLSNLPYFGSKLTSWGSSYATASSGVVTSALPQYTDPRYPLGKDDLPKATIDMEPEVLARLERFVGVDGDRIRQINAYSPSMGRTIPLVWVVPKDNTVPCPTVYAL

SEQ ID NO: 523 - DNA, 1218 bp, Corynebacterium glutamicum
  CDS (101)..(1195): RXA01274
tttatattgtcgattagtgggtttaggccctgcagtccctaactggtcatgtaatggcgaggtcagggctaccaaccacaagttcacgagggaaagacgtatgaagcttcttcgccgcatcgctgcaccagccatcgcgctgggaattgcgatgtccaccattgtcacgccatccaccgcaggcgctgccgaagtaaccccagcagacgttgctggcgatactgcactatccaccatctccgatagtgctcctgcagatgaagcctctgcacctcgctggcgcgcacacgtcaacgcagcagacgagcgcgtcaaagaaatgtgggcatactccccttccatggaccgcaatgtgccactggtagttataactgccgatgagtccgcaggtcctcgtcctgtgatttaccttcttaacggtggcgacggtggcgaaggtgccgctaactgggttatgcagactgacgttctggatttctacctagaaaagaacgttaacgttgttattccaatggaaggcaagttttcctactacaccgactgggtagaagagaatgcgtccctcggtggcaagcaaatgtgggaaaccttcctggtgaaggaacttccaggaccattggaagaaaagctcaacactgacggtcagcgtgcaattgctggcatgtccatgtccgcaactacttccctactcttcccacaacacttcccaggcttctacgacgcagcagcatccttctcaggatgcgcagcaacctcaagcctgctcccatgggaatacctcaaactcacccttgaccgcggcaacgcaaccccagaacaaatgtggggaccacgtggtggcgaatacaacatctacaacgacgcactgatcaactccgacaaactacgcggaaccgaactatacgtctccaacgcatccggccttgctggtgaatgggaatccgtcgacagcccacgcttcgaaggactcaaccaacaagttcagtccatcgcaatggcagaaactgtggtaaccggcggcatcatcgaagctgcaaccaacaagtgcacccacgacctcaaggcaaaacttgactccgccggcatcccagccgactggaacctccgcccaaccggcacccactcatggggctggtggcaagatgacctccgcggatcttggaccaccttcgctcgtgcgtttgagctagaggcctagaaacagatttaacattgaaa

SEQ ID NO: 524 - protein, 365 aa, Corynebacterium glutamicum
MKLLRRIAAPAIALGIAMSTIVTPSTAGAAEVTPADVAGDTALSTISDSAPADEASAPRWRAHVNAADERVKEMWAYSPSMDRNVPLVVITADESAGPRPVIYLLNGGDGGEGAANWVMQTDVLDFYLEKNVNVVIPMEGKFSYYTDWVEENASLGGKQMWETFLVKELPGPLEEKLNTDGQRAIAGMSMSATTSLLFPQHFPGFYDAAASFSGCAATSSLLPWEYLKLTLDRGNATPEQMWGPRGGEYNIYNDALINSDKLRGTELYVSNASGLAGEWESVDSPRFEGLNQQVQSIAMAETVVTGGIIEAATNKCTHDLKAKLDSAGIPADWNLRPTGTHSWGWWQDDLRGSWTTFARAFELEA

SEQ ID NO: 525 - DNA, 1141 bp, Corynebacterium glutamicum
  CDS (101)..(1141): RXA01449
cgcttcacataactggcggccattacacccttgcacgaacaactgctacattatctatcatattttattcattaatattgttgccggaggcatcatttccttgaagctcttcatatcccgcgcactcatcgccggtactgtttctttgactcttttctcttcaccgctcgcttccgcacagagctcgggactcagttcagtactaagttccgaagacagctcagcaactaattcagagcaggactttgagaaaagctccgaatccggatcttccgcccaggatttcatcgcgctttctactgccaacccagatctcactggcggttctgttgaaggcttgctgagttcgatgtcgctgattggttcgtcccagttgcctcttggaggcccgctcttgagtagtgattccaactatccgctcgagacagacccctcgattactgaggcaagaatcgtcgaaaagcgtgttttaaatggtcttcgactggaaaaatggtctgttgcgtcgccttcgatgcagcgcaatgtggatgtgcagatcatgaagtccgcggaggcggactcccctgctccgatgctgtacatgcttgatggaatcggcggaaataagaattcttctggttggatcaatggtggcgagggtccgaaggttttcgcggatgaaaatgtgactgtagtaatgccgttgggtgctgcttcatccatgtactcggattggttggaagaggaccctgcgctagggcgcatcaagtgggaaacttttatcgtcgaggagctcgcgcccctgcttgaggctgaggaagagctgaacttcaatggtcaccgtggcatcggcggattatccatgggtgctactggtgcggttcatttagctaactcgaaccctgatctctttgatggagtcattggcatctctggttgctactccacgcttgatcccattggacaaaccacggtgtcactaattgttaattctcgcggtggcaatgtagaaaatatgtggggtcccactggttctgaaacttggaaagctcacgatgtcacatcaaatcctgaggggctgcgcgacatggctgtctatttgtcagctgcgaacggagttgtagatgacatcgatttggcggattccgagaaagagcct

SEQ ID NO: 526 - protein, 347 aa, Corynebacterium glutamicum
LKLFISRALIAGTVSLTLFSSPLASAQSSGLSSVLSSEDSSATNSEQDFEKSSESGSSAQDFIALSTANPDLTGGSVEGLLSSMSLIGSSQLPLGGPLLSSDSNYPLETDPSITEARIVEKRVLNGLRLEKWSVASPSMQRNVDVQIMKSAEADSPAPMLYMLDGIGGNKNSSGWINGGEGPKVFADENVTVVMPLGAASSMYSDWLEEDPALGRIKWETFIVEELAPLLEAEEELNFNGHRGIGGLSMGATGAVHLANSNPDLFDGVIGISGCYSTLDPIGQTTVSLIVNSRGGNVENMWGPTGSETWKAHDVTSNPEGLRDMAVYLSAANGVVDDIDLADSEKEP

SEQ ID NO: 527 - DNA, 373 bp, Corynebacterium glutamicum
  CDS (101)..(373): RXA01798
acctttaaggatatgcaccgggggaaactatggggattttgggggaggttgttacaaaaccatacgtctgtgaagatatgacgagtgcatgcccaaaataatgcataggaaaaaggaagagttaacaatgcgtaaaggaatttcccgcatcctctcggtagcggttgctagttctattggattcggttcggtgttgtctggaaccggcatcgcagcagctcaagactctgcatttgactacggtatggatcctagcatgaactacaacccgatcgacgacatgaaggatcgtccccaagggttatccaaccttccctacttcggaagcaaactaaccagctggggctcatcagatgccaccgcctcatccggc

SEQ ID NO: 528 - protein, 91 aa, Corynebacterium glutamicum
MHRKKEELTMRKGISRILSVAVASSIGFGSVLSGTGIAAAQDSAFDYGMDPSMNYNPIDDMKDRPQGLSNLPYFGSKLTSWGSSDATASSG

SEQ ID NO: 529 - DNA, 1110 bp, Corynebacterium glutamicum
  CDS (101)..(1087): RXA01818
tatgtccggatttatttattggcatcccactactggtgcgcatgcagttaataactacagtgcgcaaatatgggagcgtcatgggtgggagtctggctggatggggtaccccatcggtggtgaagtccctgtttcggggtcgaatctcattgacggtgagatcaatggttgggtgcaaacgttccaaggtgggcgggtctatcgtaccccgatgcttgaggggttccagattgccagtattaacggcatgattttaaatagatggttggctattggcgggccggatagcgctcttggttttcccattgccgatgaagctgttgcatccgatggtgtgggtcgatttagtgttttccagaatggtgtactttactggcaccctaatcacggagcatgggaaatgaccggatttattgaagaagtatggaaaatgcgaggtggcttggattctcaatggggttatcccacatccgccccggtgttagattcagatgccccagtggaaattgcccaaaacttttctggaggcgttttcgacctagcaaccgagatcgaggatgctggttttagtccgatcgaggataaggagatgagcaacttgatacttgaatattttggttatttaggattcgatttccctggaagctcttctcgagagttggtgcaagaccattctaaatcagacttgatgactcttagggctagtagatgtgcgctcaaggattcttctcaggcaagtttcggtggggtgacgattcctagccactatgactactggggatgtcttgacaagtccgaccgacccgaccctgatgcttatgggcgccatgactactgcactctttcgcctgattcgtatggtcccctagggaagaaggctgagtttagtggggcttgtgcaagacacgatctgtgtatggatgccgttgatgcgaatggcacggggtatgctccgtgccacccggctttttatacgtggatgagcacagtttgtactaccaactatgctgaggatgctaatttcaagaagggctgtgtgaataccgcgaaggcctactataaggcagtccaattaaagaacccgaattagaaatatgcgtgattatacga

SEQ ID NO: 530 - protein, 329 aa, Corynebacterium glutamicum
MGYPIGGEVPVSGSNLIDGEINGWVQTFQGGRVYRTPMLEGFQIASINGMILNRWLAIGGPDSALGFPIADEAVASDGVGRFSVFQNGVLYWHPNHGAWEMTGFIEEVWKMRGGLDSQWGYPTSAPVLDSDAPVEIAQNFSGGVFDLATEIEDAGFSPIEDKEMSNLILEYFGYLGFDFPGSSSRELVQDHSKSDLMTLRASRCALKDSSQASFGGVTIPSHYDYWGCLDKSDRPDPDAYGRHDYCTLSPDSYGPLGKKAEFSGACARHDLCMDAVDANGTGYAPCHPAFYTWMSTVCTTNYAEDANFKKGCVNTAKAYYKAVQLKNPN

SEQ ID NO: 531 - DNA, 342 bp, Corynebacterium glutamicum
  CDS (101)..(319): RXA02607
gtgtgtttgtcgggccggaagcggggaactttcgggacggatctaactcattgcgggcctgtgcgcagtatccaaaaatcaaaatgagaaggaaaacttcatgcgcgacaccgcatttcgttccatcaaggctaaagctcaggctaagcgccgttccctctggattgcagcaggcgctgtcccaaccgcaattgcgttgactatgtccctggcacctatggcttcggctcagtccagcaacctttcctctgatgccgttattggcagcatcgcgcagggcgtcaccgatggcctgactgactacctgaagcctcgcgtctgaagagcttcctgctggtgaag

SEQ ID NO: 532 - protein, 73 aa, Corynebacterium glutamicum
MRDTAFRSIKAKAQAKRRSLWIAAGAVPTAIALTMSLAPMASAQSSNLSSDAVIGSIAQGVTDGLTDYLKPRV

SEQ ID NO: 533 - DNA, 1818 bp, Corynebacterium glutamicum
  CDS (101)..(1795): RXA02608
ggcgtcaccgatggcctgactgactacctgaagcctcgcgtctgaagagcttcctgctggtgaagtcacctacccagagatcgccgggctgcctgatggtgtgcgcgtgatcagcgctgagtgggcaacctccaagcatgtcattttgactattcagtctgcagcaatgccagagcgcccaatcaaggtgcagctgctgcttccgcgtgactggtactcttccccgaaccgtgagttccctgaaatctgggcacttgacggtctgcgcgcgattgaagagcagagtggttggaccattgagaccaacattgagcagtactacgccgataagaacgccattgttgtgctccctgtcggtggcgagagctccttctactctgactgggaagggccaaacaacggcaagaactaccagtgggagaccttcctgactcaggagctcgcaccgatcctggacaagggtttccgttctaacaccgatcgcgccatcaccggtatctccatgggcggtaccgctgcggttaacatcgcaacccaccacccagacatgtttaagttcgtcggttccttctccggctatctggacaccacctccgctggcatgccaatcgctatttccgcagccctggcagacgccggcggatacgatgccaacgcaatgtggggaccagtcggttctgagcgctggcaggaaaacgatccaaagagcaacgtagacaagctcaagggcaagaccatctacgtttcctctggtaacggtgcagatgacttcggtaaggaaggctctgtagctattggacctgcaaacgcagcaggtgtcggtctggaagttatctcccgtatgacttcccagaccttcgtcgatcgtgcaagccaggctggcgtggaagttgttgctagcttccgtccatccggcgtgcactcatgggaatactggcagttcgagatgactcaggcgttccctcacatcgctaacgctcttggcatgtccactgaggaccgtggcgttgagtgtgcacctgtcggcgcaatcgctgacgctgttgcggatggcgcgatgggcacctgcctgaccaacgaatacgatgttaccggcggtaaggcccaggacttcgctaacggtcgcgcatactggtctgcaaacactggcgctttcggcctggttggacgcatcaacgctcgttactctgagctgggtggacctgcctcctggttgggctacccaacctcttctgagttgaagacaccagacggacgtggccgcttcgtcaccttcgagcacggctccatctactggaccgccaccactggtccttgggaaatcccaggcgatatgctcgccgcatggggcacccaggactatgagaagggcagcctcggctacccaaccggcgctgcagttgaatacaacggtggcctgcgccagcagttcgaaggtggctacgtattccgtacctccaataaccagtcttactgggttcgcggagaaatctccaagaagtacgccgaagacggaatcttcgctcagcttggtttcccaaccggcaatgagaagttgatcaacggtggcgctttccaggaattcgaaaagggcaacatctactggtccgcatccactggcgcgcacgtgattctgcacggcgacatcttcgacgcatggggtgctaagggctgggagcagggcgaatacggcttcccaacctctgaccagaccgcaatcaccgcgggtggacagaccattgatttccagaacggcaccatccgtcaggtcaatggccgaattgaggagtctcgctaatagtgaagcgcatctacgca

SEQ ID NO: 534 - protein, 565 aa, Corynebacterium glutamicum
VRVISAEWATSKHVILTIQSAAMPERPIKVQLLLPRDWYSSPNREFPEIWALDGLRAIEEQSGWTIETNIEQYYADKNAIVVLPVGGESSFYSDWEGPNNGKNYQWETFLTQELAPILDKGFRSNTDRAITGISMGGTAAVNIATHHPDMFKFVGSFSGYLDTTSAGMPIAISAALADAGGYDANAMWGPVGSERWQENDPKSNVDKLKGKTIYVSSGNGADDFGKEGSVAIGPANAAGVGLEVISRMTSQTFVDRASQAGVEVVASFRPSGVHSWEYWQFEMTQAFPHIANALGMSTEDRGVECAPVGAIADAVADGAMGTCLTNEYDVTGGKAQDFANGRAYWSANTGAFGLVGRINARYSELGGPASWLGYPTSSELKTPDGRGRFVTFEHGSIYWTATTGPWEIPGDMLAAWGTQDYEKGSLGYPTGAAVEYNGGLRQQFEGGYVFRTSNNQSYWVRGEISKKYAEDGIFAQLGFPTGNEKLINGGAFQEFEKGNIYWSASTGAHVILHGDIFDAWGAKGWEQGEYGFPTSDQTAITAGGQTIDFQNGTIRQVNGRIEESR

SEQ ID NO: 535 - DNA, 1704 bp, Corynebacterium glutamicum
  CDS (101)..(1681): RXN03054
ggtggaaatacgcgcacaacaattttattcacagaacttatgattttttcgggttagggtcagtttgttcacatcaactagtaacgaaaggatcatgtgaatgaaactgttttccaaggctgcaggcgtcattgctgcagcacttcttgttgcaggtggtatagcacctgtggcacaggggcaagctagtcaggtggtcacacctgaagaccaagatgcgtatgttcaacagttccaccacgaagggaataccccacctgtggtagacggggtgggtggctacactgagcaagaaatcgccgagatccacgaggctatccgacaagcccaagaatctggcgcacctaatgaagagctcattccgggtgagatgtggtcagataaggtggagctgccagtaactattgataaagcagccgctgatgaggcagagatagctattgcacagcaacaatctcagccacagacgcgaggccttgctgcggctgcggcgtgtcagacgttttggccgtcacctcatcaggtttgtggtgctattttagagcgctatattcagcagggtgcccagtttgggtggatgttgtttccgagtgaaggccaaacgttaaatcctgatggtcaggggtatcgtcagcggtttatgaatgggtttgtttattggcatccgacaactggtgcgcatgctgttaataattacagtgcgcaggtgtgggagcgtaatgggtgggagtctgggtggatgggttatcccactggtggtgaagtccctgtgaatggttccaatccgattgatggtgagttgagtgggtgggtgcaaactttccaaggtgggcgagtgtatcgcagtccggtattggacggtttccaggtggccagtattaatgggctgatcttggataaatggcttgaattgggtggtcctgatagtgaccttggttttcccattgcggatgaggctgtgacagctgacggtgtgggtagattttctgttttccagaacggagttgtctactggcatccgcaacacggagctcaccctatattagggaatatatacagtatctggagagaagaaggagctgagagtggggaattcggttaccctatcggcgatccagaaaagtatacagaaaacatggctaatcaggtattcgaaaaaggcgaacttgcagctaacctataccccaatcctcttgaggcttttattgagtttttaccctttgctaatcttgaggaagcaatagagtattttgagaacggattgtcaaattctcgtgtagaggcgaattcacttaacgccaagaaagattcgattcaatgtcaatcgcaatccgctaacattcatgtgagaacgaagagtgacggagtcgggattagggttccaaagattgggtttaaggctaggatggattgcgaccttcctggaactgtctcagatgtagtggggtatggatggatttactacgactattggggacgatgggctcaagcagcatatgcacaacaattcttcggtaataggaattctgttgtgcaaaccaatttagaggcgggttgcagcggggagaagaatacattattttggggtacttcatattttcaggtgacttatgaaggtcagccgtatttcggtcagtcagcaactaattacgcttatcttccgtgtacgatagaccgtagttaacataaggaatggaataggag

SEQ ID NO: 536 - protein, 527 aa, Corynebacterium glutamicum
MKLFSKAAGVIAAALLVAGGIAPVAQGQASQVVTPEDQDAYVQQFHHEGNTPPVVDGVGGYTEQEIAEIHEAIRQAQESGAPNEELIPGEMWSDKVELPVTIDKAAADEAEIAIAQQQSQPQTRGLAAAAACQTFWPSPHQVCGAILERYIQQGAQFGWMLFPSEGQTLNPDGQGYRQRFMNGFVYWHPTTGAHAVNNYSAQVWERNGWESGWMGYPTGGEVPVNGSNPIDGELSGWVQTFQGGRVYRSPVLDGFQVASINGLILDKWLELGGPDSDLGFPIADEAVTADGVGRFSVFQNGVVYWHPQHGAHPILGNIYSIWREEGAESGEFGYPIGDPEKYTENMANQVFEKGELAANLYPNPLEAFIEFLPFANLEEAIEYFENGLSNSRVEANSLNAKKDSIQCQSQSANIHVRTKSDGVGIRVPKIGFKARMDCDLPGTVSDVVGYGWIYYDYWGRWAQAAYAQQFFGNRNSVVQTNLEAGCSGEKNTLFWGTSYFQVTYEGQPYFGQSATNYAYLPCTIDRS

SEQ ID NO: 537 - DNA, 931 bp, Corynebacterium glutamicum
  CDS (101)..(931): FRXA02886
ggtggaaatacgcgcacaacaattttattcacagaacttatgattttttcgggttagggtcagtttgttcacatcaactagtaacgaaaggatcatgtgaatgaaactgttttccaaggctgcaggcgtcattgctgcagcacttcttgttgcaggtggtatagcacctgtggcacaggggcaagctagtcaggtggtcacacctgaagaccaagatgcgtatgttcaacagttccaccacgaagggaataccccacctgtggtagacggggtgggtggctacactgagcaagaaatcgccgagatccacgaggctatccgacaagcccaagaatctggcgcacctaatgaagagctcattccgggtgagatgtggtcagataaggtggagctgccagtaactattgataaagcagccgctgatgaggcagagatagctattgcacagcaacaatctcagccacagacgcgaggccttgctgcggctgcggcgtgtcagacgttttggccgtcacctcatcaggtttgtggtgctattttagagcgctatattcagcagggtgcccagtttgggtggatgttgtttccgagtgaaggccaaacgttaaatcctgatggtcaggggtatcgtcagcggtttatgaatgggtttgtttattggcatccgacaactggtgcgcatgctgttaataattacagtgcgcaggtgtgggagcgtaatgggtgggagtctgggtggatgggttatcccactggtggtgaagtccctgtgaatggttccaatccgattgatggtgagttgagtgggtgggtgcaaactttccaaggtgggcgagtgtatcgcagtccggtattggacggtttccaggtggccagtattaatgggctgatcttggataaatggcttgaattgggtggtcctgatagtgac

SEQ ID NO: 538 - protein, 277 aa, Corynebacterium glutamicum
MKLFSKAAGVIAAALLVAGGIAPVAQGQASQVVTPEDQDAYVQQFHHEGNTPPVVDGVGGYTEQEIAEIHEAIRQAQESGAPNEELIPGEMWSDKVELPVTIDKAAADEAEIAIAQQQSQPQTRGLAAAAACQTFWPSPHQVCGAILERYIQQGAQFGWMLFPSEGQTLNPDGQGYRQRFMNGFVYWHPTTGAHAVNNYSAQVWERNGWESGWMGYPTGGEVPVNGSNPIDGELSGWVQTFQGGRVYRSPVLDGFQVASINGLILDKWLELGGPDSD

SEQ ID NO: 539 - DNA, 653 bp, Corynebacterium glutamicum
  CDS (1)..(630): RXN03039
  All occurrences of Xaa = any amino acid
gcactcccgcaatacaccgacccacgctaccccctcggcaaagacgacctgcccaaagcaaccatcgacatggagccagaagctcttgcgcgccttgagcgattcgtcggcgttgacggtgatcgcatccgccaaatcaacgcgtactcgccatcaatgggacgcaccattcctctagtctgggtcgtgccagaagacaacaccgtgcctggcccaacggtctacgcactcggcggcggcgacggtggccaaggcggccaaaactgggtcacccgcaccgaccttgatgagttgaccagtgaaaacaacatcaacctcatcatgcccatgctcggatcttttagtttctacgctgactgggcaggcgaaagcgaatccatgggtggtgcgcaacagtgggaaacattcctcatgcacgaactrccmgagccgctagaagcggccatcggcgcagacgggcaacgcagcatcgtcggcatgtccatgtccgggggatcrgtgctgaactttgcgacgcatgaccccaacttttaytcctckgtcggctcattttctggatgtgccgaaaccaactcctggatgggrcgccgntggcatcgcagccactgcctacaacggcaatgtcgtgcctgagcaaatctttggtgaagtag

SEQ ID NO: 540 - protein, 210 aa, Corynebacterium glutamicum
  All occurrences of Xaa = any amino acid
ALPQYTDPRYPLGKDDLPKATIDMEPEALARLERFVGVDGDRIRQINAYSPSMGRTIPLVWVVPEDNTVPGPTVYALGGGDGGQGGQNWVTRTDLDELTSENNINLIMPMLGSFSFYADWAGESESMGGAQQWETFLMHEXXEPLEAAIGADGQRSIVGMSMSGGXVLNFATHDPNFXSXVGSFSGCAETNSWMXRRWHRSHCLQRQCRA

SEQ ID NO: 541 - DNA, 809 bp, Corynebacterium glutamicum
  CDS (1)..(786): FRXA02894
ttcctcatgcacgaactgccagagccgctagaagcggccatcggcgcagacgggcaacgcagcatcgtcggcatgtccatgtccgggggatcagtgctgaactttgcgacgcatgaccccaacttttactcctcggtcggctcattttctggatgtgccgaaaccaactcctggatgggacgccgtggcatcgcagccaccgcctacaacggcaatgtcgtgcctgagcaaatctttggtgaagtagacagtgattactcccgctataacgatcctttgctcaacgctgcgaagctcgaagaacaagacaacctctacatcttcgccggttccggtgtgttctctgaactagatgtcattggtgacaacgcaccgattgatgaggatgcgtttaaaaaccgcgttctggtcggatttgaaatcgaagctatgtccaacacctgcacccataatcttaaggctgcgactgatcaaatgggcattgacaacattaactatgatttccgaccaaccggtactcatgcttgggactattggaatgaggcactgcaccgtttcttcccgttgatgatgcagggcttcgggcttgatggtggtccgatcccggtttataaccctaacggtgtgtcctctagtgagtcttcttctgagctgtcgtctgatgtgagtcttggcaccgtgatcggtagtgtggcgggaagctccggatcaagtgaaggcagcagcgtccgagagttccttgcaggaagttccggatcaagccaatcaacaggaagcttctacgaatagctagggctgcgcaagattcc

SEQ ID NO: 542 - protein, 262 aa, Corynebacterium glutamicum
FLMHELPEPLEAAIGADGQRSIVGMSMSGGSVLNFATHDPNFYSSVGSFSGCAETNSWMGRRGIAATAYNGNVVPEQIFGEVDSDYSRYNDPLLNAAKLEEQDNLYIFAGSGVFSELDVIGDNAPIDEDAFKNRVLVGFEIEAMSNTCTHNLKAATDQMGIDNINYDFRPTGTHAWDYWNEALHRFFPLMMQGFGLDGGPIPVYNPNGVSSSESSSELSSDVSLGTVIGSVAGSSGSSEGSSVREFLAGSSGSSQSTGSFYE

SEQ ID NO: 543 - DNA, 686 bp, Corynebacterium glutamicum
  CDS (1)..(675): FRXA02904
accgacccacgctaccccctcggcaaagacgacctgcccaaagcaaccatcgacatggagccagaagctcttgcgcgccttgagcgattcgtcggcgttgacggtgatcgcatccgccaaatcaacgcgtactcgccatcaatgggacgcaccattcctctagtctgggtcgtgccagaagacaacaccgtgcctggcccaacggtctacgcactcggcggcggcgacggtggccaaggcggccaaaactgggtcacccgcaccgaccttgatgagttgaccagtgaaaacaacatcaacctcatcatgcccatgctcggatcttttagtttctacgctgactgggcaggcgaaagcgaatccatgggtggtgcgcaacagtgggaaacattcctcatgcacgaactacccgagccgctagaagcggccatcggcgcagacgggcaacgcagcatcgtcggcatgtccatgtccgggggatcggtgctgaactttgcgacgcatgaccccaacttttattcctctgtcggctcattttctggatgtgccgaaaccaactcctggatggggcgccgtggcatcgcagccactgcctacaacggcaatgtcgtgcctgagcaaatctttggtgaagtagacagtgattactctcgctataacgatcctagtattctatagtgtcacct

SEQ ID NO: 544 - protein, 225 aa, Corynebacterium glutamicum
TDPRYPLGKDDLPKATIDMEPEALARLERFVGVDGDRIRQINAYSPSMGRTIPLVWVVPEDNTVPGPTVYALGGGDGGQGGQNWVTRTDLDELTSENNINLIMPMLGSFSFYADWAGESESMGGAQQWETFLMHELPEPLEAAIGADGQRSIVGMSMSGGSVLNFATHDPNFYSSVGSFSGCAETNSWMGRRGIAATAYNGNVVPEQIFGEVDSDYSRYNDPSIL

SEQ ID NO: 545 - DNA, 774 bp, Corynebacterium glutamicum
  CDS (101)..(751): RXA02025
ctatttatcgggtagcgggtcacaagcccggaataattggcagctaagtagggttgaagggcataaggcttcctcaattttcgaaaggaacattcctgttatggcatggtttttcgcacccgaacccgtgatggttaccgctgatgaggcgcttaaaggtggcaggcatcctgttttagaaaatcctgcgccgcacactgtgttgggaactcctgtgactggtccgtggaaagaaggccagcagcgaatttggattggccttggttgtttctggggtgtggagcaaatgtattggcagatggatggcgttgagggaacttcggttggttacgccggcggtttcacccctaatcccacttatcgcgaggtgtgttctgggcgcaccggccacactgaaatcgtggaggttgtttacgatccttcgaagatttccctcgagcagcttgttgcccgcggcctggaagcacacgatccgactcagggtttccgccagggtaacgatgtgggaacgcagtaccgctctgcttattacaccgagaacgaagaggacgctgcgcgcgtaaaagccgtggtcgatgcctatggtgagacgctgaagcagcacggttttggtgaaatcaccacggaaatcggtgtcattagcccgtctgactacttcctcgccgaggattaccaccagcaatacctggacaagaatcccgatggctactgccctcatcactccacgggcatcccgtgcggggtagaagcttaaaagatttttgcttttcgacg

SEQ ID NO: 546 - protein, 217 aa, Corynebacterium glutamicum
MAWFFAPEPVMVTADEALKGGRHPVLENPAPHTVLGTPVTGPWKEGQQRIWIGLGCFWGVEQMYWQMDGVEGTSVGYAGGFTPNPTYREVCSGRTGHTEIVEVVYDPSKISLEQLVARGLEAHDPTQGFRQGNDVGTQYRSAYYTENEEDAARVKAVVDAYGETLKQHGFGEITTEIGVISPSDYFLAEDYHQQYLDKNPDGYCPHHSTGIPCGVEA

SEQ ID NO: 547 - DNA, 444 bp, Corynebacterium glutamicum
  CDS (101)..(421): RXA01431
agcttctctggcctaattcacagttagccttaaaccaaaccatgtaccaatgaatgtcggattccccaggagtcccgtcattgttaatttaggagaaaccatgagcaatgttgttgcagtaaccgagcagaccttcaagtccaccgtcatcgattccgacaagccagtcatcgttgacttctgggcagaatggtgtggcccctgcaagaagctcagccccatcattgaggaaatcgcaggcgagtacggcgacaaggcagtcgttgccagcgtcgacgtcgatgcagagcgtaccttgggtgccatgttccagattatgtcgattccttctgttctcattttcaaaaatggtgcaaaagtcgaggaatttgtcggtctgcgccccaagaacgaaattgtggaaaaactagagaagcacctctagctggtattcttactgcagtc

SEQ ID NO: 548 - protein, 107 aa, Corynebacterium glutamicum
MSNVVAVTEQTFKSTVIDSDKPVIVDFWAEWCGPCKKLSPIIEEIAGEYGDKAVVASVDVDAERTLGAMFQIMSIPSVLIFKNGAKVEEFVGLRPKNEIVEKLEKHL

SEQ ID NO: 549 - DNA, 1074 bp, Corynebacterium glutamicum
  CDS (101)..(1051): RXA01432
agtttttcaaagtgtctgacgttgaaaacggtgagttcacaactagggtgaatggtgcacgtgatgctgcacttttacgtttactactttgagggaaacaatgtctgaagaacaatctgccgtagcaccaaagattcatgatgtcgccatcatcggctccggtccagctggctataccgcagcagtatatgcagcccgcgctgacctcaaccccatcatgttcgagggctatgaatacggtggatctttgatgaccactactgacgtggaaaacttcccaggctttgaaaagggaatcctgggcccagagctcatggaaaacatgcgcgctcaggccgagcgtttcggcaccgacatgcacatggagcttgtcgaccgcgttgatctcaccggcgacatcaagaagctgtgggtcggcgacgatgagtaccacgcgcgtgctgtcatcttgtccatgggttctgcacctcgctacttgggtgtgaagggcgagcaggaactgctcggccgcggcgtttctgcatgtgcaacctgcgatggtttcttcttccgcgatcaggacatcgccgtgatcggtggtggcgactccgcgatggaggaagcaaccttcctcaccaagttcgctcgcagtgtcaccatcgtgcaccgccgcgaagagttccgcgccagcgccatcatgctggagcgtgctcagaagaacgagaagattcgcttcgtcaccaacaagactgtcgaagaggtcatcgaggcagacggcaaggtcagcggtctgaagctcaacgacaccgtcactggtgaagattccgtcttggatgtcaccgccatgttcgttgccatcggccatgatccacgctctgaaatcctcgcaggtcaggtcgaggttgatccttccaactacgttttggttcaggagccttccacccgcaccaaccttgatggtgttttcgctgctggcgacctggtggacagccactaccagcaggccatcaccgcagctggttccggttgccgcgcagcgatcgatgcagagcattacctagcttctctggcctaattcacagttagccttaaacc

SEQ ID NO: 550 - protein, 317 aa, Corynebacterium glutamicum
MSEEQSAVAPKIHDVAIIGSGPAGYTAAVYAARADLNPIMFEGYEYGGSLMTTTDVENFPGFEKGILGPELMENMRAQAERFGTDMHMELVDRVDLTGDIKKLWVGDDEYHARAVILSMGSAPRYLGVKGEQELLGRGVSACATCDGFFFRDQDIAVIGGGDSAMEEATFLTKFARSVTIVHRREEFRASAIMLERAQKNEKIRFVTNKTVEEVIEADGKVSGLKLNDTVTGEDSVLDVTAMFVAIGHDPRSEILAGQVEVDPSNYVLVQEPSTRTNLDGVFAAGDLVDSHYQQAITAAGSGCRAAIDAEHYLASLA

SEQ ID NO: 551 - DNA, 495 bp, Corynebacterium glutamicum
  CDS (101)..(472): RXN00937
agctgccggtcaatgaagaaaatccttggccgggaataactacagtccgctgaaagttggtctatatatagaccttacaaatcttgaacggagattcttaatggcaaccatcgatgtaaccgaagaaacatttgagagcacagttaccggcgacggaattgtcctcgtagacgcatgggcatcctggtgcggaccttgccgccagttcgccccaacctacgagaaggtttccgaaacccacaccgacgcaaccttcgccaagcttgataccgaagcaaaccagggcctggctgcagcactgcagatccagtccatcccaactctgatggttttccgcgacggcatcatggtctaccgcgaagccggcaccatgccagctcctgcactggatgatctggtcaaccaggttaaggcactcgacatggatgacgttcgtcgccaggtcgcagagcagcagggttctgcagaggcataagcttccaattgtgttttggt

SEQ ID NO: 552 - protein, 124 aa, Corynebacterium glutamicum
MATIDVTEETFESTVTGDGIVLVDAWASWCGPCRQFAPTYEKVSETHTDATFAKLDTEANQGLAAALQIQSIPTLMVFRDGIMVYREAGTMPAPALDDLVNQVKALDMDDVRRQVAEQQGSAEA

SEQ ID NO: 553 - DNA, 146 bp, Corynebacterium glutamicum
  CDS (1)..(123): FRXA00937
gtctaccgcgaagccggcaccatgccagctcctgcactggatgatctggtcaaccaggttaaggcactcgacatggatgacgttcgtcgccaggtcgcagagcagcagggttctgcagaggcataagcttccaattgtgttttggt

SEQ ID NO: 554 - protein, 41 aa, Corynebacterium glutamicum
VYREAGTMPAPALDDLVNQVKALDMDDVRRQVAEQQGSAEA

SEQ ID NO: 555 - DNA, 871 bp, Corynebacterium glutamicum
  CDS (101)..(871): RXA01199
ctagctagggattagctttgtacttaaacttgttgtttttaagtggatttccacaaagtgttagaaaaagtcattcgagaagaaggcgtgagttttaatcgtgacgtccccgcataattttgtcagtggtgctattgatctgggtgaggtgaaagcgcgtgcggatgcgcgccagaaggcccatgagcaggggccggtaactcagggcattgctagttcccttgatgtgaccatggagaacctggagaatgaggtgctgcgtcgttccacgcaggttccggtgattgttctcgtgggtaccccgcgcagccctgattcggagcagttgaagtcggatctgaccacgcttgctgctgaaagtggcaggaagttcattttcggttatgtcaatgctgataccgatgctgatgtggcccaggtgtttggggtgcagggcttgccgtcggtgattgctgtggcagcgggacgccctctggctgatttccagggcggacagccagcggatgcactaaagcagtggactgatcaggtggttcaggctgtgggtggacagctggaaggactgccagaggaggccacagacggcgaacaagaagacgctcctgtggaagacccccgcttcgatgctgccactgatgctctaaaccgtggcgctttcgatgaggcgattgcggtttatgagtccattttggcgcaggagccaaacaacgctgatgcgaagcaagcaccgcgataccgcaaagctgttgggccggcttgccaccggtggatccttcggtggatgttgtcgctgctgcagatgctgatccaacaaacgttgatctggcctacacaagcaactgacgcggctgttgttgcgggtgatcctgag

SEQ ID NO: 556 - protein, 257 aa, Corynebacterium glutamicum
VTSPHNFVSGAIDLGEVKARADARQKAHEQGPVTQGIASSLDVTMENLENEVLRRSTQVPVIVLVGTPRSPDSEQLKSDLTTLAAESGRKFIFGYVNADTDADVAQVFGVQGLPSVIAVAAGRPLADFQGGQPADALKQWTDQVVQAVGGQLEGLPEEATDGEQEDAPVEDPRFDAATDALNRGAFDEAIAVYESILAQEPNNADAKQAPRYRKAVGPACHRWILRWMLSLLQMLIQQTLIWPTQATDAAVVAGDPE

SEQ ID NO: 557 - DNA, 681 bp, Corynebacterium glutamicum
  CDS (101)..(658): RXA00824
tttggtttggaggggccgtcagatccatttgaggcgcaaaaactcattaaaagtgatgatagggagcacctgctgaaaatggcaggaatgtagaaaacaaatgacaagcagtgcaaagtggtccatcgttggagttgtcgccatcctggctgtgatcgttgcgttaatcccgcagcttgtgggtggagaaagcgcagaggaagcgcagggggagacgtcgacaagcaaaattacgacgcgtcctgactgcgtggcctctggcgcggcgggtgtggatctgccctgcttgggcggcgccaacggcgtcggcaacgagctggccaccgtggtgaatctgtgggcgtggtggtgcgaaccgtgccgcgcggagctgccgatttttgatgaattcgccaccacccaccccgaactcaacgtcattggcgtgcatgcagaccaaaacgcagccaacggcgccgcactccttgaggatctgggcgtgaatcttgcaagctaccaagacgattccaacctgttcgcaggcacccttgggctgccgggcgtcgtgccgatcaccatcgtggtttctccagacggcaatgtagtggacaccttcccgcagcctttcgaaaccatcgatgacctcgaaaccgctgtggcaggggcgctgcagaatgcgtaactaccctgatttaccgcatg

SEQ ID NO: 558 - protein, 186 aa, Corynebacterium glutamicum
MTSSAKWSIVGVVAILAVIVALIPQLVGGESAEEAQGETSTSKITTRPDCVASGAAGVDLPCLGGANGVGNELATVVNLWAWWCEPCRAELPIFDEFATTHPELNVIGVHADQNAANGAALLEDLGVNLASYQDDSNLFAGTLGLPGVVPITIVVSPDGNVVDTFPQPFETIDDLETAVAGALQNA

SEQ ID NO: 559 - DNA, 486 bp, Corynebacterium glutamicum
  CDS (101)..(463): RXA01841
tcggggggcaccttccagttccactcaccagaaggccaaccgagattatctacgcaaaggaggaacgtgccccgctgcggacttctccggcccgtcgctgatggaggagggtgaggagatcagcctgtctgattttgaaggcgaggtcgtcgtcctcaacgcttggggccagtggtgtgcaccgtgtcgggcggaagtcgatgacctgcagcttgtccaggagactctcgaccccctcggtggcacggtgctgggcatcaacgtccgtgactacaaccagaccatcgcccaggacttcaaactcgacaacgcggtgacctatccctcgatctacgacccgccgtttcgtatcgctgcggccctgggtggggtgccgacctcggtcatcccgaccaccattgtcctggaccgaagccaccgcccggccgcggtgttcctgagggaggtcaccgcgttgtctggttagtcctgggaggtgatgagctc

SEQ ID NO: 560 - protein, 121 aa, Corynebacterium glutamicum
MEEGEEISLSDFEGEVVVLNAWGQWCAPCRAEVDDLQLVQETLDPLGGTVLGINVRDYNQTIAQDFKLDNAVTYPSIYDPPFRIAAALGGVPTSVIPTTIVLDRSHRPAAVFLREVTALSG

SEQ ID NO: 561 - DNA, 1219 bp, Corynebacterium glutamicum
  CDS (48)..(1196): RXN01863
ggtatcataccgatatgaaccaaatagaaagaaggaagtttaagacgatgaatagcgtcaaattgaagcaacctgttagcatttacaatgatccatgggaatcatataacgatgttaaagaacatggccaattaactttaagtaacatcgaatttacaactacaaatctttgtaatatgcgttgtagccactgtgcagttggttatactttacaaactgtcgaccccgagcctttagatatggacttaatttatcgtagacttgatgaaattccaaatctgcgaacgatgtcaattacaggtggcgaaccaatgttttctaaaaagtctattagaaatgttgttaaacctctattaaagtatgcacatcatcgaggtatatatacacaaatgaattcaaacctaacattgcctcaagatcgttatttagatattgctgaatatatcgatgttatgcatatctcacataactggggaacaactgatgaattcgcaaatgttggctttggcgcaatgaagaagcaaccaccgttaaaagctaagttaaaattatatgaacaaatgatttcgaatgcacgtacattatcagaacaaggaatgtttgtatctgcggaaacaatgctcaatcaaagtacgctaccacatttacgaaaaatacatcaagaagtcgttcatgatatgaaatgtagcagacacgagattcaccctatgtatccagctgactttgcaagtcaattaaatgtgttaactctagcggaaatgaaaaagacaattcatgatatattggatttcagagatgaagatatttggatgttatttggtactttgcctgtgtttccatgcttaaaggatgatgaagatcaaaagttactatcacgtttaagaaatgctaacaatgtaacgactagaaatgacccggatggccgtagtcgtttaaatgtcaatgtatttacaggtaatgtaatcgtaactgatttcggagatgaaacaggtacaatttcgaatatacaaaaagataaattaacagatgtatttgataaatggttatcctctgatcttgctaaatcattaaattgtcattgttccgagtttagttgtttaggaccaaatgttcttgttaaaaatatgtactatccgaatatggattttaaagataatgagcgtcatatgcacaaacaaccacaaattatacaattttaaaaactcttaattatgcggag

SEQ ID NO: 562 - protein, 383 aa, Corynebacterium glutamicum
MNSVKLKQPVSIYNDPWESYNDVKEHGQLTLSNIEFTTTNLCNMRCSHCAVGYTLQTVDPEPLDMDLIYRRLDEIPNLRTMSITGGEPMFSKKSIRNVVKPLLKYAHHRGIYTQMNSNLTLPQDRYLDIAEYIDVMHISHNWGTTDEFANVGFGAMKKQPPLKAKLKLYEQMISNARTLSEQGMFVSAETMLNQSTLPHLRKIHQEVVHDMKCSRHEIHPMYPADFASQLNVLTLAEMKKTIHDILDFRDEDIWMLFGTLPVFPCLKDDEDQKLLSRLRNANNVTTRNDPDGRSRLNVNVFTGNVIVTDFGDETGTISNIQKDKLTDVFDKWLSSDLAKSLNCHCSEFSCLGPNVLVKNMYYPNMDFKDNERHMHKQPQIIQF

SEQ ID NO: 563 - DNA, 888 bp, Corynebacterium glutamicum
  CDS (59)..(865): FRXA01863
ttagaaatgttgttaacctctattaaagtatgcacatcatcgaggtatatatacacaaatgaattcaaacctaacattgcctcaagatcgttatttagatattgctgaatatatcgatgttatgcatatctcacataactggggaacaactgatgaattcgcaaatgttggctttggcgcaatgaagaagcaaccaccgttaaaagctaagttaaaattatatgaacaaatgatttcgaatgcacgtacattatcagaacaaggaatgtttgtatctgcggaaacaatgctcaatcaaagtacgctaccacatttacgaaaaatacatcaagaagtcgttcatgatatgaaatgtagcagacacgagattcaccctatgtatccagctgactttgcaagtcaattaaatgtgttaactctagcggaaatgaaaaagacaattcatgatatattggatttcagagatgaagatatttggatgttatttggtactttgcctgtgtttccatgcttaaaggatgatgaagatcaaaagttactatcacgtttaagaaatgctaacaatgtaacgactagaaatgacccggatggccgtagtcgtttaaatgtcaatgtatttacaggtaatgtaatcgtaactgatttcggagatgaaacaggtacaatttcgaatatacaaaaagataaattaacagatgtatttgataaatggttatcctctgatcttgctaaatcattaaattgtcattgttccgagtttagttgtttaggaccaaatgttcttgttaaaaatatgtactatccgaatatggattttaaagataatgagcgtcatatgcacaaacaaccacaaattatacaattttaaaaactcttaattatgcggag

SEQ ID NO: 564 - protein, 269 aa, Corynebacterium glutamicum
MNSNLTLPQDRYLDIAEYIDVMHISHNWGTTDEFANVGFGAMKKQPPLKAKLKLYEQMISNARTLSEQGMFVSAETMLNQSTLPHLRKIHQEVVHDMKCSRHEIHPMYPADFASQLNVLTLAEMKKTIHDILDFRDEDIWMLFGTLPVFPCLKDDEDQKLLSRLRNANNVTTRNDPDGRSRLNVNVFTGNVIVTDFGDETGTISNIQKDKLTDVFDKWLSSDLAKSLNCHCSEFSCLGPNVLVKNMYYPNMDFKDNERHMHKQPQIIQF

SEQ ID NO: 565 - DNA, 1047 bp, Corynebacterium glutamicum
  CDS (101)..(1024): RXA02323
ggaatcattttcaatagagtcgacgcaagtgtacacttcttaatggaaattgttttcaataaagtcaagttttttgaccttcgctttttaggagcaccccatgtcatctcatgatctcgttgacgtagttgtcgtcggcgccggcgctgcaggtctcgccgccgctgtcgcgctcggccgctcactgcgcagtgtcatcgtcatcgacgctggtcaaccccgtaacagctatgcgcacgctgctcacaatgtcctcggccaggaaggcattgcgcccgccgagctgctggaaaaaggccgcgccgaagcgcgttcctatggcgtcaccattgcgcccgggcgcgtagcaaaagttgagcgcaccggttccaccttcgccataacgcttgacgacgcctccctccttcactctcggcgcatcattttggcccacggcgccgttgacgatctgccagaggtagaaggactgtcagatttttggggaaccaaagtgttgcactgcgcttactgccacggctttgaggcccgcgattctgaaatcgtcgtggtgggtacctcgcccatggctgcgcaccaagcgttgatgttctcgcagttgtccaaaactgtcagcttggtgggcacgatcgacattgatgaacaaaccagcgagagcctagatagtgctggagtaaaagtgttgggcaccaatgcggtgcgcgtatccgccgaaggtgatggcctgtctgtggaactgtccgaaggcgatcatttaagctgcgacaacatcgtggtggcatctcgtccactggtggatggcacgctgtacacccaacttggtggtcagatggaagaaaacccgatgggcaggttcattccaggtacccaaaccgggcgcactcctattgaaggtgtgtgggctgccggaaacgcgcaagctcccatggcgatggtctatggttccgctgctcaaggcgtgatggctggagcagagatcaactttgatctgatcctggaagatatttccgtggcaagcgcgcagagctaaactgcgtgaggttgtggcct

SEQ ID NO: 566 - protein, 308 aa, Corynebacterium glutamicum
MSSHDLVDVVVVGAGAAGLAAAVALGRSLRSVIVIDAGQPRNSYAHAAHNVLGQEGIAPAELLEKGRAEARSYGVTIAPGRVAKVERTGSTFAITLDDASLLHSRRIILAHGAVDDLPEVEGLSDFWGTKVLHCAYCHGFEARDSEIVVVGTSPMAAHQALMFSQLSKTVSLVGTIDIDEQTSESLDSAGVKVLGTNAVRVSAEGDGLSVELSEGDHLSCDNIVVASRPLVDGTLYTQLGGQMEENPMGRFIPGTQTGRTPIEGVWAAGNAQAPMAMVYGSAAQGVMAGAEINFDLILEDISVASAQS

SEQ ID NO: 567 - DNA, 354 bp, Corynebacterium glutamicum
  CDS (101)..(331): RXA01072
gtgtcgccttgagcgatgcaaagactttaaaaacagatctaaaaaagtaagatgaggcattagcgtcaaccgctaaagccgataagggaaggtccaaaaaatggcaatcaccgtttacaccaagccagcttgcgtccagtgcaatgccaccaagaaggccctcgaccgcgctggtcttgagtatgacctcgttgatatcagccttgatgaagaggcacgtgagtacgtcctcgcacttggctacctgcaggcaccagttgtcgttgcagatggctcccactggtccggtttccgcccagagcgcatccgtgaaatggcaaccgcagctgcctaaactgcacttcgtggcacgac

SEQ ID NO: 568 - protein, 77 aa, Corynebacterium glutamicum
MAITVYTKPACVQCNATKKALDRAGLEYDLVDISLDEEAREYVLALGYLQAPVVVADGSHWSGFRPERIREMATAAA

SEQ ID NO: 569 - DNA, 684 bp, Corynebacterium glutamicum
  CDS (101)..(661): RXA02436
atccactactaacttgaggttgccaatcgtgctcatattcaactctccttaaattggtcgcgttcttctaagaccccacattagtaaaagcatgggacatgtggttggcatttcgctcgatgtagttatgatgggcgttatgacttctaagaccgcaactgcgattctgcatacaaatcgcggagacatcaccatcgacctgttcggcaaccacgctccagagaccgtcgctaacttcgttggcctggcacagggcaccaaggactaccagtccgcaaacgctcagggcgacagcgaaggtccgttctacaacggatctgtcttccaccgcgtcatcgacggtttcatgatccagggtgaagacccaaccggcaccggccgtggcggccctggctacaccttcgctgatgaattccacccagagctgcgcttcgaccgcgcatacctgctggcaatggcaaatgcgggcccaggcaccaacggttcccagttcttcatcactgtgaccccaacccctcacctgaacaacgctcacaccatcttcggtgaggtcactgacgctgagtctcagaaggttgtggatgcaattgcaaccaccgcaaccgatcgttacgaccgcccagctgacgcagttgtcatcgagtctgtagagatcaccgcgtaacagccacctctacgtacact

SEQ ID NO: 570 - protein, 187 aa, Corynebacterium glutamicum
VVGISLDVVMMGVMTSKTATAILHTNRGDITIDLFGNHAPETVANFVGLAQGTKDYQSANAQGDSEGPFYNGSVFHRVIDGFMIQGEDPTGTGRGGPGYTFADEFHPELRFDRAYLLAMANAGPGTNGSQFFITVTPTPHLNNAHTIFGEVTDAESQKVVDAIATTATDRYDRPADAVVIESVEITA

SEQ ID NO: 571 - DNA, 900 bp, Corynebacterium glutamicum
  CDS (101)..(877): RXN01837
cccccatcattccctcaaggtgtgaagatacggttaggatagaaaagaatttttttgacgttggacattctcaaaatcaagtagcaagggatcaaactctgtgagtactaataaggaacgacgccaacaggcgctttcccagctggagaaagaaatcaaaagccgggaccgcaaagaaaagaccaagccactaaccgtggtctttgcttccctggctgtcatcctggttgtcgttggcggtatctggtacgcagctacccgcagcaccgaagacgaagtcatcaccgctgatgaaacatccaccaccgcagagacccctgactaccagccactggcgctgacccgcaccaccgcgctcggcgactccgtgacctgtgagtacccagatgctggcgaggcttccaaggatgtctccaagcctgctactgaaaacgtgccagcaaccggcaccgtgaccgtcaacctgaccaccgcccagggcaacatcggcatggaacttgatcgctccgtatccccttgtaccgtcaacgctgttgagcacatggcttccgagggctactacaacgatactgtctgccaccgcatcaccacctctggcatttacgttctccagtgcggcgatccaagcagcaccggcgcaggcggcccagggttcagcttcgccaacgaatacccaaccgacgaagcaactgacctaaccaccccagtcatctacgagcgcggcaccatcgccatggccaacgctggcgctgacaccaacgggctcccagttcttcctcaactacgaggattccccactggcaccgaactacacctacttcggccagatcaccgaagaaggccttgcaaccctcgacgccatcgcagaagttggcactgaaggtggaaccggcgacggag

SEQ ID NO: 572 - protein, 259 aa, Corynebacterium glutamicum
VSTNKERRQQALSQLEKEIKSRDRKEKTKPLTVVFASLAVILVVVGGIWYAATRSTEDEVITADETSTTAETPDYQPLALTRTTALGDSVTCEYPDAGEASKDVSKPATENVPATGTVTVNLTTAQGNIGMELDRSVSPCTVNAVEHMASEGYYNDTVCHRITTSGIYVLQCGDPSSTGAGGPGFSFANEYPTDEATDLTTPVIYERGTIAMANAGADTNGLPVLPQLRGFPTGTELHLLRPDHRRRPCNPRRHRRSWH

SEQ ID NO: 573 - DNA, 416 bp, Corynebacterium glutamicum
  CDS (1)..(393): FRXA01837
tcggagggctactacaacgatactgtctgccaccgcatcaccacctctggcatttacgttctccagtgcggcgatccaagcagcaccggcgcaggcggcccagggttcagcttcgccaacgaatacccaaccgacgaagcaactgacctaaccaccccagtcatctacgagcgcggcaccatcgccatggccaacgctggcgctgacaccaacggctcccagttcttcctcaactacgaggattccccactggcaccgaactacacctacttcggccagatcaccgaagaaggccttgcaaccctcgacgccatcgcagaagttggcactgaaggtggaaccggcgacggagcaccagcgcaagaggttcgcattgaatccgcagctgttgcgtaagttctaagcccctcttcttt

SEQ ID NO: 574 - protein, 131 aa, Corynebacterium glutamicum
SEGYYNDTVCHRITTSGIYVLQCGDPSSTGAGGPGFSFANEYPTDEATDLTTPVIYERGTIAMANAGADTNGSQFFLNYEDSPLAPNYTYFGQITEEGLATLDAIAEVGTEGGTGDGAPAQEVRIESAAVA

SEQ ID NO: 575 - DNA, 2127 bp, Corynebacterium glutamicum
  CDS (101)..(2104): RXS01277
tactactcggttcacgtttacgtcggctgatccaattggaggcgccctcggaagccgccttaaaaaacctgccggtcaaaagatcactaacctgaacttcatgactgattacacgttcctcgaagacattgacaccccggaagcgctcgcgtgggcggaaaaatggtcgggggaaagcgtcgaaaagctaaaaagcccagccaaggacgccctggaagccaggctgctggctgcgttggacaccgatgatcgcattgcctacgtgagccggcgcggtgagaagctgtacaacttttggcgggacgcgcagcatccgcgtggagtgtggcgcacgaccacgttggagtcgtatgaaagtgaccagccggagtgggacgtgctcattgatgtggatgcgttggcggaggatgagggcgaaaactgggtatggaagggcgcggttgtgcgctcgccggagtttgatcgggcgttggtgaagttctcgcggggcggggctgatgcgacggtgattagggagtttgatctggccacggctgctttcgtggatgattcgccgtttgaattgaaggaggcgaagtccgatgtcacgtgggttgatctggatacgttgctggtgggcacggataccggcgaggggtcactgacggattctgggtacccggcgcgggtgctcacgtggaagcgtgggactccgcttgagcaggcggagttgttctttgaggggtcgcgtcaggatgtggcgactcatgcgtggcgggattcaacacctggttttgagcggacgtttgtgtcaaggtcgttggatttctataattcggagacgtcgctggaaaccgagggtggcctggtcaagcttgatgtgccgaccgattgcgatgtcattgtgaagaagcagtggatttttgtgagtcctcggacggatttcgctgggattccagcaggtggcttgggagtgctgctgttaaaggagttccttgagggcgggcgcgattttcagcctgtgtttacgcctactgagtcgacgtcgctgcagggattggccacgacaaagaatttcctggttttaacgctccttaataatgtctccacagaaatcgtcacagtgccgctcaatgatccgacaacggagcatgaacacattgacctcccagagcatgtcaccgcgcatgtggttgctacctccccgttggatggcgatgaaatttgggtgcaggcagcgagtttcaccgaagcgccaacgttgctgcgtgcggagctgcctggtgcgcttgaggctgtgaagaaggcgccgttgcagtttgaaaatgctggtcaggagactcgtcagcattgggcaacctcggcggatggaacgaagattccgtactttattacaggagccttcgaggaggaaccacaaaacaccctggtccacgcctacggcggcttcgaggtttcccttaccccaagccactccccgacccgcggcatcgcatggttggaaaagggctactactttgtggaagccaacctgcgtggtggcggtgaattcggtccggaatggcattcgcaggcaaccaagctgaaccgcatgaaggtgtgggaggatcaccgcgcggtgctcgccgaccttgtggagcgcggctacgcaacgccggagcagattgcgattcgtggcggatccaacggtggtttgctgacaagtggcgcgttaactcagtacccagaagcattcggtgcggcagttgtgcaggtgccgttggctgatatgttgcgctatcacacctggtcagcgggtgcttcgtggatggcggagtacggcaaccctgacgatccggaggaacgggcggtgattgagcagtactcgccggtgcaggcggtggtgggcgtcgagaagcgaatttatccacccgcattggtgacgacctcaacccgggacgaccgcgtccaccccgcgcacgcgcgcctttttgctcaagctttgcttgatgcgggccaggccgtggattactacgaaaacaccgagggcggccatgccggcgcggcggataacaagcagaccgcgtttgtggaatcgctgatctacacctggatcgagaagactttggatcagcagggtagcatttaatacctatgattatgcgaagg

SEQ ID NO: 576 - protein, 668 aa, Corynebacterium glutamicum
MTDYTFLEDIDTPEALAWAEKWSGESVEKLKSPAKDALEARLLAALDTDDRIAYVSRRGEKLYNFWRDAQHPRGVWRTTTLESYESDQPEWDVLIDVDALAEDEGENWVWKGAVVRSPEFDRALVKFSRGGADATVIREFDLATAAFVDDSPFELKEAKSDVTWVDLDTLLVGTDTGEGSLTDSGYPARVLTWKRGTPLEQAELFFEGSRQDVATHAWRDSTPGFERTFVSRSLDFYNSETSLETEGGLVKLDVPTDCDVIVKKQWIFVSPRTDFAGIPAGGLGVLLLKEFLEGGRDFQPVFTPTESTSLQGLATTKNFLVLTLLNNVSTEIVTVPLNDPTTEHEHIDLPEHVTAHVVATSPLDGDEIWVQAASFTEAPTLLRAELPGALEAVKKAPLQFENAGQETRQHWATSADGTKIPYFITGAFEEEPQNTLVHAYGGFEVSLTPSHSPTRGIAWLEKGYYFVEANLRGGGEFGPEWHSQATKLNRMKVWEDHRAVLADLVERGYATPEQIAIRGGSNGGLLTSGALTQYPEAFGAAVVQVPLADMLRYHTWSAGASWMAEYGNPDDPEERAVIEQYSPVQAVVGVEKRIYPPALVTTSTRDDRVHPAHARLFAQALLDAGQAVDYYENTEGGHAGAADNKQTAFVESLIYTWIEKTLDQQGSI

SEQ ID NO: 577 - DNA, 215 bp, Corynebacterium glutamicum
  CDS (1)..(192): FRXA02047
tgggacgaccgcgtccaccccgcgcacgcgcgcctttttgctcaagctttgcttgatgcgggccaggccgtggattactacgaaaacaccgagggcggccatgccggcgcggcggataacaagcagaccgcgtttgtggaatcgctgatctacacctggatcgaaaagactttggatcagcagggtagcatttaatacctatgattatgcgaagg

SEQ ID NO: 578 - protein, 64 aa, Corynebacterium glutamicum
WDDRVHPAHARLFAQALLDAGQAVDYYENTEGGHAGAADNKQTAFVESLIYTWIEKTLDQQGSI

SEQ ID NO: 579 - DNA, 477 bp, Corynebacterium glutamicum
  CDS (101)..(454): RXA02174
cttcggccgaagccacttcgtctgtcataatgacagggatggtttcggccgtttttgcatgaaaccaaaaaatacgattttcaaggagcatgtacagcacatggaaaagccacagattgagctaccggtcggtccagcaccggaagatctcgtaatctctgacatcatcgttggcgaaggagcagaagcccgcccaggtggagaagttgaggtccactatgtgggcgttgactttgaaaccggcgaggagtttgactcttcctgggatcgtggacagaccagccagttcccactcaacggcctcattgcaggttggcaagagggaattccaggcatgaaggtcggcggacgtcgtcagctgaccattccgccagaggctgcttacggccctgagggttccggccacccactgtctggccgtaccctggtgttcatcatcgatttgatcagcgcataattttctttactgcgctaaac

SEQ ID NO: 580 - protein, 118 aa, Corynebacterium glutamicum
MEKPQIELPVGPAPEDLVISDIIVGEGAEARPGGEVEVHYVGVDFETGEEFDSSWDRGQTSQFPLNGLIAGWQEGIPGMKVGGRRQLTIPPEAAYGPEGSGHPLSGRTLVFIIDLISA

SEQ ID NO: 581 - DNA, 1470 bp, Corynebacterium glutamicum
  CDS (101)..(1447): RXA00568
gtttcggacgacgcgagaaatcgcattaatcgtcggaaaccgggcttgtttttgtaatatctgaaactttccctttcccgatcatccaggagatttactcgtgaagagttctgtcgagaagctgagcgacacccgttcaaagatcaccgttgaggttccattttctgaactgaagccagagatcgaccaggcatacgccgctctagcgcagcaagtccagatccctggtttccgtaagggcaaggcaccgcgtcagcttatcgacgcacgcttcggccgtggtgcggttctggagcaggttgtcaacgacatgcttcctaaccgctacgcacaggcaatcgaagctgagggcatcaaggcaatcggccagcctaacgtagaggtcaccaagatcgaagacaacgagctcgttgagttcgtcgctgaggttgacgttcgcccagagttcgagcttcctaagttcgaggacatcactgttgaggtcccagctatcaaggctgacgaagaggcaatcgaagcagagctcgagaccctgcgtgcacgtttctccaccttgaaggatcacaaccacaagctgaagaagggtgagttcgtcaccatcaacatcaccgcaagcattgacggtgagaagattgaagaggcaaccactgagggtctgtcctacgaaatcggatctgacgatctgattgacggcctggacaaggctctgatcggcgctaagaaggatgaaaccgtagagttcacctctgagctggcaaacggcgagcacaagggcaaggaagctcaaatcagcgttgagatcaccgcaaccaagcagcgcgagctgcctgagctggatgatgagttcgcacagctggcttctgagttcgacaccatcgaagagcttcgtgagtccaccgtgtctgacgttgaggctaagcagaagaacgagcaggctgctgcaatccgcgacgaagttctcgctgcggctcttggcgaggctgacttcgctctgccacagtccatcgttgacgagcaggcacactcccagctgcaccagctcctcggcgagcttgcacacgacgatgctgcactgaactccctccttgaggctcagggcaccactcgtgaagagttcgacaagaagaacgtcgaagatgctgagaaggctgttcgcacccagctgttcctggacaccctctctgaggttgaggagcctgaggtttcccagcaggagctcaccgaccacatcctgttcaccgcacagtcttacggcatggacccaaaccagttcatcggtcagctgcagcagtccggccagatcgcgaacctcttctccgacgttcgccgtggcaaggctcttgcacaggctatctgccgcgtaaacgtgaaggactccgagggtaacgagatcgaccctaaggaatacttcggtgaagaagaagtagctgagactgagtctgaagcttaaaaactttaaagaaataacgc

SEQ ID NO: 582 - protein, 449 aa, Corynebacterium glutamicum
VKSSVEKLSDTRSKITVEVPFSELKPEIDQAYAALAQQVQIPGFRKGKAPRQLIDARFGRGAVLEQVVNDMLPNRYAQAIEAEGIKAIGQPNVEVTKIEDNELVEFVAEVDVRPEFELPKFEDITVEVPAIKADEEAIEAELETLRARFSTLKDHNHKLKKGEFVTINITASIDGEKIEEATTEGLSYEIGSDDLIDGLDKALIGAKKDETVEFTSELANGEHKGKEAQISVEITATKQRELPELDDEFAQLASEFDTIEELRESTVSDVEAKQKNEQAAAIRDEVLAAALGEADFALPQSIVDEQAHSQLHQLLGELAHDDAALNSLLEAQGTTREEFDKKNVEDAEKAVRTQLFLDTLSEVEEPEVSQQELTDHILFTAQSYGMDPNQFIGQLQQSGQIANLFSDVRRGKALAQAICRVNVKDSEGNEIDPKEYFGEEEVAETESEA

SEQ ID NO: 583 - DNA, 432 bp, Corynebacterium glutamicum
  CDS (101)..(409): RXN03040
  All occurrences of n = any nucleotide
  All occurrences of Xaa = any amino acid
attactctcgctataacgatccttntgctcaacgctgcgaagctcgaagaacaagacaacctctacatcttcgccggttccggtgtgttctctgaactagatgtcatncggtgacaacgcaccgattgatgaggatgcgttcaaaaaccgcgtcttggttgggtttgaaatcgaagctatgtccaacacctgcacccataacctcaaggctgcgaccgatcaaatgggcatcgacaacatcaactacgatttccgaccaaccggaacccacgcctgggattactggaacgaagcgctccaccgcttcttcccgttgatgatgcagggcttcggcctcgacggtggtcccatcccgatctataaccctaacggtgtgacctccagcgagtcttctntcagaactgtcttctgatgtgagccttggcaccngtg

SEQ ID NO: 584 - protein, 103 aa, Corynebacterium glutamicum
  All occurrences of Xaa = any amino acid
MSXGDNAPIDEDAFKNRVLVGFEIEAMSNTCTHNLKAATDQMGIDNINYDFRPTGTHAWDYWNEALHRFFPLMMQGFGLDGGPIPIYNPNGVTSSESSXRTVF

SEQ ID NO: 585 - DNA, 835 bp, Corynebacterium glutamicum
  CDS (101)..(835): RXN03051
acatccagaagtagtcgttgagtatcacgagcaagtcaacgatagtaaagataatgtcgaggaactcccgctgcctaagcgggacatagttgcaggggacatgcgttcagatgttatcgagttaccggagggggtaagcaaggagaaagctgaccagctagaagttgcggaagcgcgacttaacgagggtgcacgactgatggcaaccaccgggtgtgaggttatgtggccaacgggcttctcagtttgtggccgaattcttgacacctatcgccaggttggaggtcagttgtcatggcttgggccaccgaagtcaaacgagttgaccaatcccgacggtgttggcaaaagaagtgaattttttggtggagccatctattggcacccagacacaggcgcttatgcagtgaccttggacggtttgcgacagtgggggaccttgaactgggaatcagggccattggggtacccaacctctggtccgatggatacaaactatccccttactcagcgacagacttttcaaggtggtgacaactactacaacccattgactggcggtgctgtgtggggcgatattaaacagcgctacgaagaacttggcggctcgaatcatgccattggcatcccgatcactaatgagctacctagcggtactgagtatttttacaataatttctccaatggaacaatttcgtggcgaaatgatcgtcagacacggtttatgtatttggctacgcagcgggtgtgggatgcgttgggtcgggagacgggtcgtttaggttttcctgaagcagatgaaacacctgaggtttctggtctattccatgtggcg

SEQ ID NO: 586 - protein, 245 aa, Corynebacterium glutamicum
MRSDVIELPEGVSKEKADQLEVAEARLNEGARLMATTGCEVMWPTGFSVCGRILDTYRQVGGQLSWLGPPKSNELTNPDGVGKRSEFFGGAIYWHPDTGAYAVTLDGLRQWGTLNWESGPLGYPTSGPMDTNYPLTQRQTFQGGDNYYNPLTGGAVWGDIKQRYEELGGSNHAIGIPITNELPSGTEYFYNNFSNGTISWRNDRQTRFMYLATQRVWDALGRETGRLGFPEADETPEVSGLFHVA

SEQ ID NO: 587 - DNA, 456 bp, Corynebacterium glutamicum
  CDS (101)..(433): RXN02949
actctcgaaggttgaacacagggctgcgattgtgctggatcaaatgtctgcacgaaaaattgttatcgcccctggatgagtagtgatttagaggagtgctgtgagcgacgagcagaattctggcgtaggcggaacgtctcgcccaacgggtaaacgccagctgtcgggtgcttccactacctctacctcttcttatgaggctaagcaggtatctacacagaagaagtcatccggttcggattctaagcctggcggcggtgttatttcttttctgcctgaggttgtgggagaagtccgtaaggttatttggcctactgcgcgccagatggtcacgtacacccttgtcgttttgggattcttgattgttttgaccgctttggtgtctggtgtggatttcctagctggtcttggagttgagaagattctgactccgtaggtaggatgtgtaacatcttt

SEQ ID NO: 588 - protein, 111 aa, Corynebacterium glutamicum
VSDEQNSGVGGTSRPTGKRQLSGASTTSTSSYEAKQVSTQKKSSGSDSKPGGGVISFLPEVVGEVRKVIWPTARQMVTYTLVVLGFLIVLTALVSGVDFLAGLGVEKILTP

SEQ ID NO: 589 - DNA, 618 bp, Corynebacterium glutamicum
  CDS (101)..(595): RXN00833
agctttttgcatgtgtcatatcgtaccgtttgcataggcctgttcgcgcttggtgaaccttttctagcaccaaaacaaaactctccctagtatggggtccatggctaaaacacattttcaaggcaacgaaactgctacctccggcgaactgccacaggtcggcgacaacctcgcagagttcaacctcgtcaacaccgaactgggcgaggtctcctcaaaggacttccagggccgcaagcttgtcctgaacatcttcccatccgttgacaccggcgtttgtgcaacatcagtccgcaagttcaacgaggcagcagcaagcctggaaaacaccaccgtgctgtgcatctccaaggatcttccattcgcactgggccgtttctgctccgcagaaggcatcgagaacgtcaccccagtatccgcattccgttccaccttcggtgaagacaacggcatcgtgctcgaaggctcaccacttaagggtcttcttgcacgcagcgtcatcgtcgtcgatgaaaacggcaaggttgcttacacccagttggttgatgagatcttcactgaacctgattacgacgctgcacttgctgggctgaactaatttacttcgctcaggggaat

SEQ ID NO: 590 - protein, 165 aa, Corynebacterium glutamicum
MAKTHFQGNETATSGELPQVGDNLAEFNLVNTELGEVSSKDFQGRKLVLNIFPSVDTGVCATSVRKFNEAAASLENTTVLCISKDLPFALGRFCSAEGIENVTPVSAFRSTFGEDNGIVLEGSPLKGLLARSVIVVDENGKVAYTQLVDEIFTEPDYDAALAGLN

SEQ ID NO: 591 - DNA, 879 bp, Corynebacterium glutamicum
  CDS (101)..(856): RXN01676
agttacagcttttctcggtggcacactcgcgctacttagcccttgtgccgcactccttttaccagcattttttgcatcctcagtgggtgctggcccgcgcatgatccttcacggtgttgtgttctacgcaggacttctagtacttctcgtgccacttggccttggtgcgggaatcctcggcgagctgtttatcacccaacgccagaccatcatcgtggtttcatcgatcgtgctgattatcctaggttttgtccagatcttcggcggcggattcgacttcggaaaagcactcccaggattagatcgtctgcaatctaaggccactgtgacctcaggtctaggaaagagctttttactaggaatgaccagtagtattgccggtttttgttccggaccaatcctcggcgccgttcttactttggctgccaccagtggaaactccatcacctcagcactcattttgagtgcttatggtgcgggaatggtgctgcccctgatggctattgcagcgctctgggccaaactcggacagcgtggacagcagatgctccgcggccgggaattcaccttcttgggcaggcagtggcacattgtttctgtcattagcggtgccctgatcatcgctgtcggaatcctcttttggtccacgaacggccttgtcagcatgccggagctcgttccaatggacacccagatctggctacaggaagccacattctcactcgggtcaccactctttgacatcgcattgatcattgtcgccgctggcttgttcttgtacttctggaacaaacgacaaaagcgaaaagaagaagctcagcgacccaaagaaagtggatgggttattaaccctcgctaattattagttttggagcgagg

SEQ ID NO: 592 - protein, 252 aa, Corynebacterium glutamicum
MILHGVVFYAGLLVLLVPLGLGAGILGELFITQRQTIIVVSSIVLIILGFVQIFGGGFDFGKALPGLDRLQSKATVTSGLGKSFLLGMTSSIAGFCSGPILGAVLTLAATSGNSITSALILSAYGAGMVLPLMAIAALWAKLGQRGQQMLRGREFTFLGRQWHIVSVISGALIIAVGILFWSTNGLVSMPELVPMDTQIWLQEATFSLGSPLFDIALIIVAAGLFLYFWNKRQKRKEEAQRPKESGWVINPR

SEQ ID NO: 593 - DNA, 744 bp, Corynebacterium glutamicum
  CDS (101)..(721): RXN00380
caggcaatgcgacctcgcctcagtgacatccttggtgttccaagacgatcaaattgtcggcgtgcattacaacgaaccagctcaggagatttgatcactcgtgcgtttgaccaaactagcagcaacaatcggctgcgtgacactcagcggacttgcgctagtagcctgcagcagtgacagtaccgctggtactgacgctgttgctgtcggcggaaccttccaattccactccccggatggaaagatggaaattttctacgacgaggctgaccgtcaacaactccccgacattggtggagattccctcatggaagagggcacacagatcaacctgtctgatttcgaaaaccaagttgtcatcctcaatgcgtgggggcagtggtgtgcaccgtgccgctccgaatccgatgatctccagattatccatgaggaactccaagctgccggaaacggcgacacccctggtggcaccgtgttgggtatcaatgtgcgtgattactcccgcgacatcgcccaagactttgtcaccgacaacggccttgattacccaagcatttacgatccaccatttatgacagcagcatccctcggtggtgttcccgcatcggtgatcccaaccaccatcgtgctggataaacagcaccgccccgcagcagtgttcttgcgcgaagtcacctccaaagatgtgttggatgttgcgttgccattggtagatgaggcctaaatgtctgagattgtggtagc

SEQ ID NO: 594 - protein, 207 aa, Corynebacterium glutamicum
VRLTKLAATIGCVTLSGLALVACSSDSTAGTDAVAVGGTFQFHSPDGKMEIFYDEADRQQLPDIGGDSLMEEGTQINLSDFENQVVILNAWGQWCAPCRSESDDLQIIHEELQAAGNGDTPGGTVLGINVRDYSRDIAQDFVTDNGLDYPSIYDPPFMTAASLGGVPASVIPTTIVLDKQHRPAAVFLREVTSKDVLDVALPLVDEA

SEQ ID NO: 595 - DNA, 990 bp, Corynebacterium glutamicum
  CDS (101)..(967): RXN02325
cagagatttgaagatggagaccaaggctcaaagggaatccatgccgtcttggtttaatactgcacccgtctaatgaaaatcattactattaggtgtcatgatggaccatgcacacgattcctgctcaccaactctgcgccgtgatttggaggtcactggccagctccaacctgagaaagctgtcgatttagcagcgccgcacgaagggaaggttgccaatataacgaaggtgacctcctcaaatatggagcacaccatcacgcaggcctcaaaagctaaggaggtggtggtgctcattggtcactccctgctgcccacatttcaggatttggaaaaagacattctgcactttcaggcaggtaataaagggcgattttctgtagcgattgttgatcctgatcgcagtgcagatgtggttgccagatttaggccaaaacagattccggtggcatacgtggtgaaagatggcgccagcattgcggagttcaactcgctcaacaaggagccggttgcacaatggcttgatcattttgtgtcgcgggaaacgatccccaatgaaaaagagggggacgtcgataagcaaatagacccgcgcctgtggcgggcagcggaattggtgaacgccggtgattttcgcgcggcgttggcgttgtatgagcagttgccgcaggatgcgacggtgaagcgggcgcacgcggcggtgtcggtattggcgcggatgtctgtggcggatcggggagaggatccgatcgagaagtcgcgccgggatccagacgatgtgaacaaggcgctggcggcggcggatatgtatgtgttgatgaatcagccggacacagcgctcgcgcaccttgcagcactattgccaaaaccggaggctgcccggcggatcgtggagttgctgaacttgtttgatccgctggacctggtcgcattggaaatcagggcgcaggtggggaatgcaatgagctaagaaaacactttaaatattct

SEQ ID NO: 596 - protein, 289 aa, Corynebacterium glutamicum
MDHAHDSCSPTLRRDLEVTGQLQPEKAVDLAAPHEGKVANITKVTSSNMEHTITQASKAKEVVVLIGHSLLPTFQDLEKDILHFQAGNKGRFSVAIVDPDRSADVVARFRPKQIPVAYVVKDGASIAEFNSLNKEPVAQWLDHFVSRETIPNEKEGDVDKQIDPRLWRAAELVNAGDFRAALALYEQLPQDATVKRAHAAVSVLARMSVADRGEDPIEKSRRDPDDVNKALAAADMYVLMNQPDTALAHLAALLPKPEAARRIVELLNLFDPLDLVALEIRAQVGNAMS

SEQ ID NO: 597 - DNA, 1737 bp, Corynebacterium glutamicum
  CDS (101)..(1714): RXN00493
cccgttacggcggcaccgagatcaagttcggtggcgtggagtacttgcttctctccgctcgtgacatcctcgcaatcgtcgagaagtaggggataagttcatggcaaagctcattgcttttgaccaggacgcccgcgaaggcattctccggggcgttgacgctctggcaaacgctgtcaaggtaaccctcggcccacgcggccgtaacgtggttcttgataaggcattcggcggacctctggtcaccaacgacggtgtcaccattgcccgcgacatcgaccttgaggatccttttgagaacctcggtgcgcagctggtgaagtccgttgctgttaagaccaacgacatcgctggtgacggcaccacgactgcaactctgcttgctcaggcactcattgctgaaggcctgcgcaacgttgctgctggcgcaaacccaatggagctcaacaagggtatttctgcagctgcagaaaagaccttggaagagttgaaggcacgcgcaaccgaggtgtctgacaccaaggaaatcgcaaacgtcgctaccgtttcatcccgcgatgaagttgtcggcgagatcgttgctgcagcgatggaaaaggttggcaaggacggtgtcgtcaccgttgaggagtcccagtccatcgagactgctctcgaggtcaccgaaggtatttctttcgacaagggctacctttccccttatttcatcaacgacaacgacactcagcaggctgtcctggacaaccctgcagtgctgcttgttcgcaacaagatttcttccctcccagacttcctcccattgctggagaaggttgtggagtccaaccgtcctttgctgatcatcgcagaagacgtcgagggcgagcctttgcagaccctggttgtgaactccatccgcaagaccatcaaggtcgttgcagtgaagtccccttacttcggtgaccgacgcaaggcgttcatggatgacctggctattgtcaccaaggcaactgtcgtggatccagaagtgggcatcaacctcaacgaagctggcgaagaagttttcggtaccgcacgccgcatcaccgtttccaaggacgaaaccatcatcgttgatggtgcaggttccgcagaagacgttgaagcacgtcgcggccagatccgtcgcgaaatcgccaacaccgattccacctgggatcgcgaaaaggcagaagagcgtttggctaagctctccggtggtattgctgtcatccgcgttggtgcagcaactgaaaccgaagtcaacgaccgcaagctgcgtgtcgaagatgccatcaacgctgctcgcgcagcagcacaagaaggcgttatcgctggtggcggttccgctttggttcagatcgctgagactctgaaggcttacgccgaagagttcgaaggcgaccagaaggtcggcgttcgcgcactggctactgctttgggcaagccagcgtactggatcgcctccaacgcaggtcttgacggctctgttgttgttgcacgcactgctgctctgccaaacggcgagggcttcaacgctgcaactttggaatacggaaacctgatcaacgacggtgtcatcgacccagtcaaggtcacccattccgcagtagtgaatgcaacctctgttgcacgcatggttctgaccactgaggcttctgttgttgagaagcctgcagaagaagcagccgatgcacatgcaggacatcatcaccactaaagttctgtgaaaaacaccgt

SEQ ID NO: 598 - protein, 538 aa, Corynebacterium glutamicum
MAKLIAFDQDAREGILRGVDALANAVKVTLGPRGRNVVLDKAFGGPLVTNDGVTIARDIDLEDPFENLGAQLVKSVAVKTNDIAGDGTTTATLLAQALIAEGLRNVAAGANPMELNKGISAAAEKTLEELKARATEVSDTKEIANVATVSSRDEVVGEIVAAAMEKVGKDGVVTVEESQSIETALEVTEGISFDKGYLSPYFINDNDTQQAVLDNPAVLLVRNKISSLPDFLPLLEKVVESNRPLLIIAEDVEGEPLQTLVVNSIRKTIKVVAVKSPYFGDRRKAFMDDLAIVTKATVVDPEVGINLNEAGEEVFGTARRITVSKDETIIVDGAGSAEDVEARRGQIRREIANTDSTWDREKAEERLAKLSGGIAVIRVGAATETEVNDRKLRVEDAINAARAAAQEGVIAGGGSALVQIAETLKAYAEEFEGDQKVGVRALATALGKPAYWIASNAGLDGSVVVARTAALPNGEGFNAATLEYGNLINDGVIDPVKVTHSAVVNATSVARMVLTTEASVVEKPAEEAADAHAGHHHH

SEQ ID NO: 599 - DNA, 1977 bp, Corynebacterium glutamicum
  CDS (101)..(1954): RXN02543
ctcaatgaggagtttttcttaccggcgaaagtcggtgggaagcaagtcaaagctcaagccgtggacagtactaaaatcacctaaaacaggaggcaccattatgggacgtgcagtaggaattgaccttggaaccaccaactctgtggtttccgtacttgaaggcggcgagccagtagttatcgcaaacgcagaaggctcacgcaccaccccttccgtcgttgcattcgcaaagaacggtgaagttctagtcggccagtccgctaagaaccaggcggtcaccaacgttgaccgcaccattcgctccgtcaagcgccacatcggcaccgactggtccgttgctatcgatgacaagaactacacctcacaggaaatctcggctcgtaccctgatgaagctgaagcgcgacgctgaagcatacctgggcgaggacgtcactgatgctgttattaccgttcctgcatacttcgaggactcacagcgccaggcaaccaaggaagctggtcagatcgcaggccttaacgttctgcgtattgttaacgagccaaccgcggctgcacttgcatacggccttgagaagggcgagcaggagcagaccattctggtattcgacctcggtggcggcaccttcgacgtctccctcctagagatcggcgacggtgttgttgaggttcgcgcaacctccggcgataacgagctcggtggcgacgactgggatcagcgtatcgttgactggctggtagagaagttccagtcctccaacggcattgacctgaccaaggacaagatggccctgcagcgtctgcgtgaggcagctgagaaggcaaagatcgagctgtcctcttcccagagtgcaaacatcaaccttccttacatcaccgttgatgcagacaagaacccactgttcttggatgagaccctttcccgtgccgagttccagcgcatcacccaggacctcctggcccgcaccaagactcctttcaaccaggttgttaaggacgctggcgtgtccgtctcggagatcgaccacgttgttctcgtcggtggttccacccgtatgcctgctgttaccgaactggtcaaggaactgaccggtggacgtgagccaaacaagggtgttaacccagatgaggttgttgcagttggtgcagcacttcaggccggtgttctccgcggcgaggtcaaggatgttcttcttcttgacgtcaccccactgtccctcggcattgagaccaagggtggcgtgatgaccaagctcatcgagcgcaacaccaccatccctaccaagcgttccgagaccttcaccaccgcagaggacaaccagccttctgttcagatccaggtcttccagggcgagcgtgaaatcgcaaccgccaacaagctgctcggatccttcgagctcggcggcatcgcacctgcaccacgtggcgtcccacagatcgaggtcactttcgacatcgacgccaacggcatcgtccacgtcaccgcaaaggacaagggtactggcaaggaaaacaccatcaccattcaggacggctccggtctctcccaggatgaaattgatcgcatgatcaaggatgctgaagctcacgctgatgaggacaagaagcgccgcgaggagcaggaagtccgcaacaacgctgagtccctggtttaccagacccgcaagttcgttgaagagaactccgagaaggtctccgaagacctcaaggcaaaggtcgaagaggcagccaagggcgttgaagaagcactcaagggcgaggacctcgaggcaatcaaggctgcagttgagaagctgaacaccgagtcccaggaaatgggtaaggctatctacgaggctgacgctgctgctggtgcaacccaggctgacgcaggtgcagaaggcgctgcagatgacaatgttgttgacgctgaagttgtcgaagacgacgcagctgacaatggtgaggacaagaagtaaatgactacccctaacggaat

SEQ ID NO: 600 - protein, 618 aa, Corynebacterium glutamicum
MGRAVGIDLGTTNSVVSVLEGGEPVVIANAEGSRTTPSVVAFAKNGEVLVGQSAKNQAVTNVDRTIRSVKRHIGTDWSVAIDDKNYTSQEISARTLMKLKRDAEAYLGEDVTDAVITVPAYFEDSQRQATKEAGQIAGLNVLRIVNEPTAAALAYGLEKGEQEQTILVFDLGGGTFDVSLLEIGDGVVEVRATSGDNELGGDDWDQRIVDWLVEKFQSSNGIDLTKDKMALQRLREAAEKAKIELSSSQSANINLPYITVDADKNPLFLDETLSRAEFQRITQDLLARTKTPFNQVVKDAGVSVSEIDHVVLVGGSTRMPAVTELVKELTGGREPNKGVNPDEVVAVGAALQAGVLRGEVKDVLLLDVTPLSLGIETKGGVMTKLIERNTTIPTKRSETFTTAEDNQPSVQIQVFQGEREIATANKLLGSFELGGIAPAPRGVPQIEVTFDIDANGIVHVTAKDKGTGKENTITIQDGSGLSQDEIDRMIKDAEAHADEDKKRREEQEVRNNAESLVYQTRKFVEENSEKVSEDLKAKVEEAAKGVEEALKGEDLEAIKAAVEKLNTESQEMGKAIYEADAAAGATQADAGAEGAADDNVVDAEVVEDDAADNGEDKK

SEQ ID NO: 601 - DNA, 1575 bp, Corynebacterium glutamicum
  CDS (101)..(1552): RXN01345
cataacctcattgaacatgcaaaactaatgcttttggggggtatgcataaattcgtttcgttccactgcacagcccgaaaatgctgctagggtcaagttcatgcgttttggacttgacttgggaactacccgcacaatcgcggccgccgtggaccgcggaaactatcccatcgtcactgtggaagattctttaggcgacacccacgatttcattccatctgtggtggccctcaaggcagataggattgtcgcgggttgggatgctattgaggttgggcaggaccacccttccttcgtacgttctttcaaacgcctactctctgaacccaatgtcacggaagccaccccggtctacttgggcgatcatgtacaccctttgggcgccgtcctggaggcttttgcggaaaacgtggtcactgcgctgcgtgcatttcagacgcaattgggagatacctccccgatcgaagtagtcattggtgtgcccgccaactcccacagcgcccagcgactgctcaccatgtccgccttcagcgccacaggcatcaccgttgtcggtttggtcaatgagcccagcgccgcagctttcgagtacacccaccgccacgcccgcaccttaaactccaagcgccaagccatcgtggtttatgatttgggaggcggaacattcgactcctcgctcatccgcatcgacggcacccaccacgaggttgtgtcctccattggcatttcacgccttggtggcgatgatttcgatgaaatcctcctccaatgcgcgctcaaggccgcaggcagacagcacgatgcgtttggcaagcgtgctaaaaacacgcttctcgacgaatcccgcaacgcgaaggaagctcttgttccgcaatcccgtcgcttggttctagaaattggcgacgacgacatcaccgttccagtgaacaagttctacgaggctgccactcccctggtggaaaaatccttgtccatcatggaacccctcatcggcgtcgatgatcttaaagattccgacatcgcaggcatctaccttgttggtggaggatcctcgctcccactcgtttccaggttgctccgcgagcgtttcggccgccgtgtccaccgctccccattcccctcaggttccactgcggtgggtctggccatcgcggctgacccttcctctggtttccacctaagggaccgcgttgcgcgaggcatcggtgtgttccgtgagcacgattctggtcgtgccgtgagctttgacccgctgatcgccccggacaccgattctgcgaccgtggcgaaacgatgctacaaggcggtgcacaacattggttggttcaggttcgtggaatactccaccgtgtccgaggatggcagccccggagatatttccctgctcagtgaaatcaagattccttttgatagctccatcaccgatgtggatgctaccgagatttcacgtttcgatggcccagaagtagaagaaaccatcacagtcaatgacaacggcgtggcttccatttccatcaagatactcggcggcgttaccgtcgagcacacaatttagttaccattttggtgctggtg

SEQ ID NO: 602 - protein, 484 aa, Corynebacterium glutamicum
MRFGLDLGTTRTIAAAVDRGNYPIVTVEDSLGDTHDFIPSVVALKADRIVAGWDAIEVGQDHPSFVRSFKRLLSEPNVTEATPVYLGDHVHPLGAVLEAFAENVVTALRAFQTQLGDTSPIEVVIGVPANSHSAQRLLTMSAFSATGITVVGLVNEPSAAAFEYTHRHARTLNSKRQAIVVYDLGGGTFDSSLIRIDGTHHEVVSSIGISRLGGDDFDEILLQCALKAAGRQHDAFGKRAKNTLLDESRNAKEALVPQSRRLVLEIGDDDITVPVNKFYEAATPLVEKSLSIMEPLIGVDDLKDSDIAGIYLVGGGSSLPLVSRLLRERFGRRVHRSPFPSGSTAVGLAIAADPSSGFHLRDRVARGIGVFREHDSGRAVSFDPLIAPDTDSATVAKRCYKAVHNIGWFRFVEYSTVSEDGSPGDISLLSEIKIPFDSSITDVDATEISRFDGPEVEETITVNDNGVASISIKILGGVTVEHTI

SEQ ID NO: 603 - DNA, 1080 bp, Corynebacterium glutamicum
  CDS (101)..(1057): RXN02736
cagaggattacccagcgggtacgtggggtccaaagagcgctgatgaaatgctttcccgcaacggtcacacctggcgcaggccataatttaggggcaaaaaatgatctttgaacttccggataccaccacccagcaaatttccaagaccctaactcgactgcgtgaatcgggcacccaggtcaccaccggccgagtgctcaccctcatcgtggtcactgactccgaaagcgatgtcgctgcagttaccgagtccaccaatgaagcctcgcgcgagcacccatctcgcgtgatcattttggtggttggcgataaaactgcagaaaacaaagttgacgcagaagtccgtatcggtggcgacgctggtgcttccgagatgatcatcatgcatctcaacggacctgtcgctgacaagctccagtatgtcgtcacaccactgttgcttcctgacacccccatcgttgcttggtggccaggtgaatcaccaaagaatccttcccaggacccaattggacgcatcgcacaacgacgcatcactgatgctttgtacgaccgtgatgacgcactagaagatcgtgttgagaactatcacccaggtgataccgacatgacgtgggcgcgccttacccagtggcggggacttgttgcctcctcattggatcacccaccacacagcgaaatcacttccgtgaggctgaccggtgcaagcggcagtacctcggtggatttggctgcaggctggttggcgcggaggctgaaagtgcctgtgatccgcgaggtgacagatgctcccaccgtgccaaccgatgagtttggtactccactgctggctatccagcgcctggagatcgttcgcaccaccggctcgatcatcatcaccatctatgacgctcatacccttcaggtagagatgccggaatccggcaatgccccatcgctggtggctattggtcgtcgaagtgagtccgactgcttgtctgaggagcttcgccacatggatccagatttgggctaccagcacgcactatccggcttgtccagcgtcaagctggaaaccgtctaaggagaaatacaacactatgg

SEQ ID NO: 604 - protein, 319 aa, Corynebacterium glutamicum
MIFELPDTTTQQISKTLTRLRESGTQVTTGRVLTLIVVTDSESDVAAVTESTNEASREHPSRVIILVVGDKTAENKVDAEVRIGGDAGASEMIIMHLNGPVADKLQYVVTPLLLPDTPIVAWWPGESPKNPSQDPIGRIAQRRITDALYDRDDALEDRVENYHPGDTDMTWARLTQWRGLVASSLDHPPHSEITSVRLTGASGSTSVDLAAGWLARRLKVPVIREVTDAPTVPTDEFGTPLLAIQRLEIVRTTGSIIITIYDAHTLQVEMPESGNAPSLVAIGRRSESDCLSEELRHMDPDLGYQHALSGLSSVKLETV

SEQ ID NO: 605 - DNA, 1947 bp, Corynebacterium glutamicum
  CDS (101)..(1924): RXN02280
cgcgattgcgtcatcgatcgttgttgcttccatgcgcaccacactatctttctgcacgccctgatgccctgtggattcaaaactgtgcttttataggcgtatgcaagaatcctcacgtgataatttccaagttgacctcggcggcgttgttgatcttttgagtcgccacatttattccggtccgagggtgtatgtgcgtgagttgctgcagaatgcggttgatgcttgtactgcacgttctgaacagggtgaggagggctacgagccgagtattcgtattcggccggtgaccaaggatcgtgccacgttttcactggttgataatggtacgggcctgaccgcgcaggaggcgcgggaattgctggcgacggtggggcggacgtcgaaacgcgatgaattcggtctgcagcgggaaggtcgcctggggcaatttggcatcgggctgcttagttgtttcatggtggcggatgagatcaccatggtgtcgcatgcggagggtgcgtcggcgattcggtggactggtcatgcggatggcacctttaacctggagattcttggggatgacgcaacggatgtcattccggtgggcacgactgtgcacctgactccgcgccctgatgagcgcacgttgctgacggaaaattccgtggtcaccattgctagtaattatggccgctacctgccgattcctattgtggtgcagggtgagaaaaacaccaccatcactacatcgccggtgtttgcaaaggatactgatcagcagcacaggctgtatgccggccgggagcgccttggtaaaactccttttgatgtcatcgatctcaccggtcctggcatcgagggtgtggcttatgtattgccggaggcccaggctccgcatatgtccaggcgtcacagtatttatgtcaaccgcatgttggtctctgatgggccttccacggtgctgcccaactgggcgttctttgtggaatgtgaaatcaattcaaccgatttggaacccaccgcatcgcgtgaagcgctcatggatgacaccgcgttcgcggcaaccagggaacatatcggtgagtgcattaaatcgtggctgattaatctcgccatgaccaagcctcaccgcgtgcgggaatttactgcgattcatgatcttgccctgcgcgagctgtgccaatcggacgcggacctggctgaaaccatgttgggtcttctcaccttggagacctcccgtggtcgcatctcgatcggtgagatcaccacgttgtccatcaccgaggatgtgtcgctgcagctggctaccacgttggatgatttcaggcagctcaacaccattgcgcgcccggacaccttgattattaatggcggctacattcacgacagcgatctggctcggctcattcccgttcactacccaccgcttacggtatctactgctgacctgcgcgaatccatggatctgatggagcttccgccgctgcaggacattgagaaagccaaggcactggatgcgcaggtcacggaatcattgaaggattttcagatcaagggcgcaacgagggtttttgaacccgcagatgttcctgccgtggtgatcattgattccaaggcgcaggcctcacgggatcgcaatgaaacacaaagcgcaaccactgatcgttgggctgacattttggcaacggtggataacacgttgagccgtcaaacagccaacattccacaggatcagggactgtcggcgttgtgcttgaattggaacaattcgctggtcaggaaattggcgtccactgatgacaccgccgtggtgtcgcgcacggtgcgtttgctctacgttcaggcattgttgtccagcaagaggccactgcgggtgaaggaacgcgcgctgcttaatgattcgctggcagatctggtttctttgtctttgtcatccgatatctaagacaatcctccgctaatctt

SEQ ID NO: 606 - protein, 608 aa, Corynebacterium glutamicum
MQESSRDNFQVDLGGVVDLLSRHIYSGPRVYVRELLQNAVDACTARSEQGEEGYEPSIRIRPVTKDRATFSLVDNGTGLTAQEARELLATVGRTSKRDEFGLQREGRLGQFGIGLLSCFMVADEITMVSHAEGASAIRWTGHADGTFNLEILGDDATDVIPVGTTVHLTPRPDERTLLTENSVVTIASNYGRYLPIPIVVQGEKNTTITTSPVFAKDTDQQHRLYAGRERLGKTPFDVIDLTGPGIEGVAYVLPEAQAPHMSRRHSIYVNRMLVSDGPSTVLPNWAFFVECEINSTDLEPTASREALMDDTAFAATREHIGECIKSWLINLAMTKPHRVREFTAIHDLALRELCQSDADLAETMLGLLTLETSRGRISIGEITTLSITEDVSLQLATTLDDFRQLNTIARPDTLIINGGYIHDSDLARLIPVHYPPLTVSTADLRESMDLMELPPLQDIEKAKALDAQVTESLKDFQIKGATRVFEPADVPAVVIIDSKAQASRDRNETQSATTDRWADILATVDNTLSRQTANIPQDQGLSALCLNWNNSLVRKLASTDDTAVVSRTVRLLYVQALLSSKRPLRVKERALLNDSLADLVSLSLSSDI

SEQ ID NO: 607 - DNA, 1977 bp, Corynebacterium glutamicum
  CDS (101)..(1954): RXS00170
taactaattctttacctatcctcagtttgtacatattttccgacaggtaaaggtttgatataagcggttggtacgaagactagtgggtgtttctgctgtcatgttgctggccatcggggttgcatctccggtagctcaagcacaagtggaagatcaatttgagcttgtaaaagaaatcagtgatgagcagtttgctgatgatggtgttgactatgttcccaataggaatgctccgactgttaaggaacaacttgaggatttcgaatcagcacatccagaagtagtcattgagtatcacgagcacgtcaacgatagtaaagacaatgttgaggaacttccgctacctaagcgggacatcgttgcaggggaaatgcgctcagatgtcatcgagttaccggagggggtgagcaaggacgaagctgatcaggtggaggttgcggaagcgcgacttaatgagggcgcacgattgatggctgcaactgggtgtgaggctatgtggccaacaggtttctcagtttgtggccggattcttgacgcttatcggcaggttggaggtcagttgtcatggcttgggccaccaaagtcaaacgagttgaccaatcccgacggtgttggcaaaagaagtgaatttgttgggggtgccatctattggcatccagacacaggcgcttatgcagtgaccctggacggtttgaggcagtgggggaccttgaactgggaatcagggccattggggtacccaacctctggtccgatggatacaaactatccccttactcagcgacagacttttcaaggtggtgacaactattacaacccattgactggcggtgctgtgtggggcgatattaaacagcgctacgaagaacttggcggctcgaatcatgccattggcatcccgatcactaatgagctacctagcggtactgagtatttttacaataatttcttcaatggaacaatttcgtggcgaaatgatcgtcagacacggtttatgtatttggctacgcagcgggtgtgggatgcgttgggtcgggagacgggtcgtttaggttttcctgaagcagatgaaacacctgaggtttctggtctattccatgtggtgaattttgcggagcgcggggtgattgcgtggaatggaatcctaggcgccagagagctgtatggtgatgtttactccctgtggctgcaataccaaaataccgatactcctttagggtggccgataccatcattgacatcattaaatgagtcactcgaacaagaattcaccagaggtgttgttttaggctcaggtgatgcactgacatggattcctgacgatgaagaaagaagtttggaggatttcctcccaattggaagtagcggctcatcctcatcgagccaagagatgaccctgttttcccagcgtgcacaatacgtggattgcaagaatcttcccgatttagatgagcagagaaaaactgaaaacaacattgaaaagaatggtggcccgatcaaaaaagagtatagttcgcgaggtttccccaccgagttcagatttgtcgtgagaaaagggcattatgaccgttacaggaatgaaggctggggatatttaaaaaactattgcaaacacaacttcgccaaccacgctatggctgaggccgtagtagataaagcggtgattgattatggctcatcgccaggaaccagctattacaagttcgagaaaacggtgtactttctagattgcagaacttatacattcaataagaactcaggatgtaaagaaatgcacgctccgcaatgggtgactattatttacaatcctcatactttcactggagcaaattcgaacagacccaagggggtaatttcagcatggtgtaattcaaccccacctggtggaatcgaacacgagccggaaatttcccaatgtcctgatcatgtgaatctttataataagcttcgcatatgacagaaccccatcaactgtgc

SEQ ID NO: 608 - protein, 618 aa, Corynebacterium glutamicum
MLLAIGVASPVAQAQVEDQFELVKEISDEQFADDGVDYVPNRNAPTVKEQLEDFESAHPEVVIEYHEHVNDSKDNVEELPLPKRDIVAGEMRSDVIELPEGVSKDEADQVEVAEARLNEGARLMAATGCEAMWPTGFSVCGRILDAYRQVGGQLSWLGPPKSNELTNPDGVGKRSEFVGGAIYWHPDTGAYAVTLDGLRQWGTLNWESGPLGYPTSGPMDTNYPLTQRQTFQGGDNYYNPLTGGAVWGDIKQRYEELGGSNHAIGIPITNELPSGTEYFYNNFFNGTISWRNDRQTRFMYLATQRVWDALGRETGRLGFPEADETPEVSGLFHVVNFAERGVIAWNGILGARELYGDVYSLWLQYQNTDTPLGWPIPSLTSLNESLEQEFTRGVVLGSGDALTWIPDDEERSLEDFLPIGSSGSSSSSQEMTLFSQRAQYVDCKNLPDLDEQRKTENNIEKNGGPIKKEYSSRGFPTEFRFVVRKGHYDRYRNEGWGYLKNYCKHNFANHAMAEAVVDKAVIDYGSSPGTSYYKFEKTVYFLDCRTYTFNKNSGCKEMHAPQWVTIIYNPHTFTGANSNRPKGVISAWCNSTPPGGIEHEPEISQCPDHVNLYNKLRI

SEQ ID NO: 609 - DNA, 2199 bp, Corynebacterium glutamicum
  CDS (101)..(2176): RXS02641
aggcttctcagttgtttcatatagtctcagccgcaccaatatcatcagggagaacatcgtgcagcaacgacgccgcatcagcgagactcggaaaaaaccgatgctcgctattattttgaccgccgtattgggcgcatctggccttgcagccgctggcactcagtacctcaatactcagggcgaaggcatcggtccggtcgccgtccaaaacgacagtgaatcgtttaattccggcaccaacgtggttgttgaagacgcagcagtcaccgcccagggtgaaggcggaggcgctcgcaccgtcaaggaattccagcgtgaccagcaattctctagttttgctcttacctggaccggtaaaaaagacatcactgcttttgttcgcgcagaacaggaagacggcacctggtcacagtggtacgacttggagccaatggtcaatgaagatcaaggcaccaacggaactgagctgatctggcacggccctaccaacaagatccaggtttccaccctcaacgtggatctctttggagcagatgctgcagccgctgatgaaaacggtcaagacattccagcagtagatgcagccgaggcagcgccagcagcagaacctgcaccagctgaagcaccagtcgaggaagctcctgcacctgtcgcagaaccagcaccagctgctgaacctatcgctgagccagtcgctgattactcagcaaatgacggcctcgctcccctgccatccaactatggcgacatccagcctgttgccgatgttgatgacggcctaaacgcagtatttatcgatggcaacgctgatgcaggcgtgggtatcgctaacgttgctgacaccgatggcatgccaaaggtgatttctcgtgctggttggggtgcggacgaaagtctgcgctgctcaaacccaactattgatgatggcgtttctgcgatcaccattcaccacactgcgggttccaacaactacaccgaggcgcaggctgcagcccaggttcgtagtgcttacagctaccacgccaagaacctcggctggtgcgatatcggataccagtcattggttgataagtacggcaacatctacgaaggccgtgccggcggcatgaccaatgctgttcagggtgctcacgctggcggcttcaaccagaatacttgggcaatctccatgattggcgactattcctacaacgctccccctcaggaaaccatcaatgctgtcggtgagcttgctggttggcgtgcaaaggttgccggtttcgacccaactgggactgatactcactactcggagggtacttcttacgcgaagtactcctatggcacccgagtgtcacttcctaatatcttggctcaccgcaatgtcggcctgaccgcatgtcctggcgatgctggctatgcgcaaatggagaatatccgccagatcgttaaggcaaagtacaccagcttgcagaatggcaacacaggtggcacgactaccaccccggcgacaacgccgaaggagacgtcgacaagcaatgctccttcgacgaccactgcccagcttgtaactcccgctgaacctcagcagtacagcgaatccgatgccctggcagctctgctgacaggtggctcttccggcggcaccgacctgctcaatggcgcaaactctgagcagctcctgactggcctgggttccattgcggctgtgctgattgctgcgtctttggctgatggtggcctgaatggtctgatcagcaatgttggtagcaacaacggcgtcccagtgcttggcgatatcaagatcactgacgtcatcccaatcgttgataccgcgatcaacctaaccggagacaataagtactctcgcggttggaacgacctgaacaacacgcttggaccagtgcttggcgctgccactggtggcgaaaccaccgtgaagtacaccagcgaccagaactctgaggttactttcgtgccgtttgaaaatggcatcatggtgtcttcccctgaggctggaactcacggcctgtggggcgcaatcggtgacgcgtgggctcagcagggcgctgaccttggccctctgggacttccaaccagtaatgaatacaccgttggcgaacagcttcgtgttgatttccagaatggttacatcacttacgattctgcgactggccaggcaagcattcagctgaactagtctcaattagagccgaaaac

SEQ ID NO: 610 - protein, 692 aa, Corynebacterium glutamicum
MLAIILTAVLGASGLAAAGTQYLNTQGEGIGPVAVQNDSESFNSGTNVVVEDAAVTAQGEGGGARTVKEFQRDQQFSSFALTWTGKKDITAFVRAEQEDGTWSQWYDLEPMVNEDQGTNGTELIWHGPTNKIQVSTLNVDLFGADAAAADENGQDIPAVDAAEAAPAAEPAPAEAPVEEAPAPVAEPAPAAEPIAEPVADYSANDGLAPLPSNYGDIQPVADVDDGLNAVFIDGNADAGVGIANVADTDGMPKVISRAGWGADESLRCSNPTIDDGVSAITIHHTAGSNNYTEAQAAAQVRSAYSYHAKNLGWCDIGYQSLVDKYGNIYEGRAGGMTNAVQGAHAGGFNQNTWAISMIGDYSYNAPPQETINAVGELAGWRAKVAGFDPTGTDTHYSEGTSYAKYSYGTRVSLPNILAHRNVGLTACPGDAGYAQMENIRQIVKAKYTSLQNGNTGGTTTTPATTPKETSTSNAPSTTTAQLVTPAEPQQYSESDALAALLTGGSSGGTDLLNGANSEQLLTGLGSIAAVLIAASLADGGLNGLISNVGSNNGVPVLGDIKITDVIPIVDTAINLTGDNKYSRGWNDLNNTLGPVLGAATGGETTVKYTSDQNSEVTFVPFENGIMVSSPEAGTHGLWGAIGDAWAQQGADLGPLGLPTSNEYTVGEQLRVDFQNGYITYDSATGQASIQLN

SEQ ID NO: 611 - DNA, 702 bp, Corynebacterium glutamicum
  CDS (101)..(679): RXS02650
gaatttttgctgcaactgtgtaaaaaccagcgctgaattaaagatcacctttcacccttaattgagcctgggtggaagtttctaccgctcatggggaaagatggtcaacgtgacctcaaaggatgcaggggcaaacgtgacccccatgagtaagaaagaaaagaggacaaccgttaaacaggtggttgccttgatggccgccatcgttgtggtgattgcgtccctagaccaaatagtcaagcagattatgcttagttggttggaacctggcgttcccgttcccatcattggggattggttccgcttctacctcctgtttaaccccggagccgcattttcgatgggtggggaaaacagcacctggatctttacaaccatccagttgagcttcgtcatcggtatcgcaatttatgccccacgcatcaaacacaagtggatcgcggcaggacttgcccttgttgccggtggagccttgggaaacgtgttggaccggttgttcagagatccttccttcttcttcggacatgttgttgattacatctccgtaggaaactttgcagtatttaatatcgccgatgcctcgatttcttgcggcgtcgtggtgttcctgatcggaatgttccttgaggaccgtgaaaacgcccagcatgccaaagcaactgacgagaaggatgaggcctgatgaacaaccgacaaagcaga

SEQ ID NO: 612 - protein, 193 aa, Corynebacterium glutamicum
MVNVTSKDAGANVTPMSKKEKRTTVKQVVALMAAIVVVIASLDQIVKQIMLSWLEPGVPVPIIGDWFRFYLLFNPGAAFSMGGENSTWIFTTIQLSFVIGIAIYAPRIKHKWIAAGLALVAGGALGNVLDRLFRDPSFFFGHVVDYISVGNFAVFNIADASISCGVVVFLIGMFLEDRENAQHAKATDEKDEA

SEQ ID NO: 613 - DNA, 1494 bp, Corynebacterium glutamicum
  CDS (101)..(1471): RXS00076
tctaggagtgttaaacagcctggacttgaaacacctttaactacttgattttcacacccttgtttccataaaagggctcacgaaaggcaacttcaaacacatgacaactcccctgcgcgtagccgtcatcggagctggccctgctggcatttacgcatccgacctcctcatccgcaatgaagagcgcgaagtgttcgttgaccttttcgagcaaatgcctgcaccgttcggactcatccgttacggcgttgctccagaccacccacgcatcaagggcatcgttaagtccctgcacaacgtgttggacaagccacgcctgcgcctgctcggtaacattgaaatcggcaaagacatcaccgtcgaagaactccgcgactactacgatgcagtcgtgttctccaccggcgcagttgcagaccgcgacctcaacatccccggaattgaagcagaaggctccttcggtgccggcgagttcgttggcttctacgacggcaacccacgcttcgagcgctcctgggatctgtctgcacagtccgtcgctgttatcggcgttggtaacgtcggcctcgacgtagcccgcatcctggctaagacaggcgacgagctcaaagtcaccgaaatttccgacaacgtctacgactccctcaaagaaaacaaggccactgaagtgcacgttttcggacgtcgtggcccagcacaggtcaagttcaccccacaggaactcaaagaactcgaccactcccccaccatcaacgtggttgttgatccagaagacatcgactacgacggcgcctctgaagaagcccgccgcgcatccaagtcccaggacctggtctgccagatcctggaacagtacgcaatccgcgagccaaaggacgctccgcacaccctgcagatccacctctttgaaaacccagttgaggttcttcaaaaggacggcaaggttgttggcctgcgcaccgaacgcacctcacttgatggcaacggcggcgtaaacggaaccggcgaattcaaggactggccagtccaggctgtctaccgcgcagtcggctacaagtccgaccccatcgacggcgtcccattcgatgagaacaagcacgtcatccctaatgacggcggacatgtcctcaccgctccaggcgcagaaccagtaccaggcctctatgcaaccggctggatcaagcgtggaccaatcggtctaatcggcaacaccaagtccgacgccaaggaaaccaccgacatcctcatcaaggatgccgtcgccggtgtacttgaagctccaaagcaccagggcgaagaagccatcatcgagcttctcgattcccgcaacatcccattcaccacctgggaaggctggtacaaactcgacgcagcagagcgcgcactcggtgaagccgaaggccgcgagcgcaagaagattgttgattgggaagaaatggtccgccaggcccgcgaagctccagcaattgtctaaattgttttaacgcgtgaagc

SEQ ID NO: 614 - protein, 457 aa, Corynebacterium glutamicum
MTTPLRVAVIGAGPAGIYASDLLIRNEEREVFVDLFEQMPAPFGLIRYGVAPDHPRIKGIVKSLHNVLDKPRLRLLGNIEIGKDITVEELRDYYDAVVFSTGAVADRDLNIPGIEAEGSFGAGEFVGFYDGNPRFERSWDLSAQSVAVIGVGNVGLDVARILAKTGDELKVTEISDNVYDSLKENKATEVHVFGRRGPAQVKFTPQELKELDHSPTINVVVDPEDIDYDGASEEARRASKSQDLVCQILEQYAIREPKDAPHTLQIHLFENPVEVLQKDGKVVGLRTERTSLDGNGGVNGTGEFKDWPVQAVYRAVGYKSDPIDGVPFDENKHVIPNDGGHVLTAPGAEPVPGLYATGWIKRGPIGLIGNTKSDAKETTDILIKDAVAGVLEAPKHQGEEAIIELLDSRNIPFTTWEGWYKLDAAERALGEAEGRERKKIVDWEEMVRQAREAPAIV

SEQ ID NO: 615 - DNA, 1488 bp, Corynebacterium glutamicum
  CDS (101)..(1465): RXS01438
ccattagcagtcgcaccccgataggagtcgaatctacaagtggaacccccgctcacatactccacattttttagaacccctttaaggaatcgaactttatatgtctcgccctttgcgtgttgccgttgtcggtgcaggtccagcaggaatctacgcgtctgatttgttgatgaaatccgacacggacgtgcagattgatctttttgaacgtatgccagcgcctttcggtttgatccgttatggtgttgcgcctgatcaccctcgcatcaagggcatcgtgaagtccctgcacaatgtgatggacaaggagcagctgcgtttcttgggcaacattgaggtcggcaaggacatcactgttgaggagttgcgtgagttttatgacgcgatcgtgttctccactggcgctactggcgaccaggatcttcgggttccaggttctgatctggaaggttcgtggggcgctggcgagttcgttggtttctatgatggcaacccgaactttgaacgcaactgggatctttctgctgagaaggtagcggttgttggtgtcggtaacgtggcgttggacgttgctcgtattttggcgaagactggcgatgagctgctagttactgaaatccctgacaatgtctatgagagcttggctaagaatcaggctaaggaagtgcacgtttttggtcgtcgtggacctgctcaggcgaagttcactccgttggagctgaaggaacttgaccattccgacaccatcgaggtgatcgtgaaccctgaggacattgattacgatgcagcttcggagcaggctcgtcgtgattccaagtctcaggacctcgtgtgccagactttggaaagctacgcgatgcgcgatcctaagggcgctcctcacaagctgttcattcacttctttgagtccccagtggagatcctcggtgaggacggcaaggttgttggcctcaagactgagcgtactcagctggacggcaacggtggcgtgactggcaccggcgagttcaagacctgggatatgcagtcagtttaccgcgcggtaggttaccgttctgatgcgatcgagggtgttccttttgacgatgagcgcgcggttgtccccaacgacggcggccacatcatcgatcctgaggtcggctcccccatcactggcctgtacgccactggctggatcaagcgtggcccaattggactgatcggcaacaccaagtccgacgccaaggaaaccactgagatgctgcttgctgatcacgctgctggttctttgcctgcgcctgcaaagcctgagttggagtccatcattgagttcctcgatgagcgcaaggttgcgttcaccacatgggatggctggcacctgctggatgctgcggagcgcgcgctgggtgagcctgagggccgcgagcgcaagaagatcgttgagtggaatgacatggtgcgccatgctcgtccagaatacgacatctaaagtcgcttaaagcctcaaaa

SEQ ID NO: 616 - protein, 455 aa, Corynebacterium glutamicum
MSRPLRVAVVGAGPAGIYASDLLMKSDTDVQIDLFERMPAPFGLIRYGVAPDHPRIKGIVKSLHNVMDKEQLRFLGNIEVGKDITVEELREFYDAIVFSTGATGDQDLRVPGSDLEGSWGAGEFVGFYDGNPNFERNWDLSAEKVAVVGVGNVALDVARILAKTGDELLVTEIPDNVYESLAKNQAKEVHVFGRRGPAQAKFTPLELKELDHSDTIEVIVNPEDIDYDAASEQARRDSKSQDLVCQTLESYAMRDPKGAPHKLFIHFFESPVEILGEDGKVVGLKTERTQLDGNGGVTGTGEFKTWDMQSVYRAVGYRSDAIEGVPFDDERAVVPNDGGHIIDPEVGSPITGLYATGWIKRGPIGLIGNTKSDAKETTEMLLADHAAGSLPAPAKPELESIIEFLDERKVAFTTWDGWHLLDAAERALGEPEGRERKKIVEWNDMVRHARPEYDI

SEQ ID NO: 617 - DNA, 18 bp, Artificial Sequence
  Description of Artificial Sequence: primer
ggaaacagtatgaccatg

SEQ ID NO: 618 - DNA, 17 bp, Artificial Sequence
  Description of Artificial Sequence: primer
gtaaaacgacggccagt

What is claimed:

1. An isolated nucleic acid molecule from Corynebacterium glutamicum encoding an SES protein, or a portion thereof, provided that the nucleic acid molecule does not consist of any of the F-designated genes set forth in Table 1.

2. The isolated nucleic acid molecule of claim 1, wherein said nucleic acid molecule encodes an SES protein involved in the production of a fine chemical.

3. An isolated Corynebacterium glutamicum nucleic acid molecule selected from the group consisting of those sequences set forth in Appendix A, or a portion thereof, provided that the nucleic acid molecule does not consist of any of the F-designated genes set forth in Table 1.

4. An isolated nucleic acid molecule which encodes a polypeptide sequence selected from the group consisting of those sequences set forth in Appendix B, provided that the nucleic acid molecule does not consist of any of the F-designated genes set forth in Table 1.

5. An isolated nucleic acid molecule which encodes a naturally occurring allelic variant of a polypeptide selected from the group of amino acid sequences consisting of those sequences set forth in Appendix B, provided that the nucleic acid molecule does not consist of any of the F-designated genes set forth in Table 1.

6. An isolated nucleic acid molecule comprising a nucleotide sequence which is at least 50% homologous to a nucleotide sequence selected from the group consisting of those sequences set forth in Appendix A, or a portion thereof, provided that the nucleic acid molecule does not consist of any of the F-designated genes set forth in Table 1.

7. An isolated nucleic acid molecule comprising a fragment of at least 15 nucleotides of a nucleic acid comprising a nucleotide sequence selected from the group consisting of those sequences set forth in Appendix A, provided that the nucleic acid molecule does not consist of any of the F-designated genes set forth in Table 1.

8. An isolated nucleic acid molecule which hybridizes to the nucleic acid molecule of any one of claims 1-7 under stringent conditions.

9. An isolated nucleic acid molecule comprising the nucleic acid molecule of claim 1 or a portion thereof and a nucleotide sequence encoding a heterologous polypeptide.

10. A vector comprising the nucleic acid molecule of claim 1.

11. The vector of claim 10, which is an expression vector.

12. A host cell transfected with the expression vector of claim 11.

13. The host cell of claim 12, wherein said cell is a microorganism.

14. The host cell of claim 13, wherein said cell belongs to the genus Corynebacterium or Brevibacterium.

15. The host cell of claim 12, wherein the expression of said nucleic acid molecule results in the modulation in production of a fine chemical from said cell.

16. The host cell of claim 15, wherein said fine chemical is selected from the group consisting of: organic acids, proteinogenic and nonproteinogenic amino acids, purine and pyrimidine bases, nucleosides, nucleotides, lipids, saturated and unsaturated fatty acids, diols, carbohydrates, aromatic compounds, vitamins, cofactors, polyketides, and enzymes.

17. A method of producing a polypeptide comprising culturing the host cell of claim 12 in an appropriate culture medium to, thereby, produce the polypeptide.

18. An isolated SES polypeptide from Corynebacterium glutamicum, or a portion thereof.

19. The polypeptide of claim 18, wherein said polypeptide is involved in the production of a fine chemical production.

20. An isolated polypeptide comprising an amino acid sequence selected from the group consisting of those sequences set forth in Appendix B, provided that the amino acid sequence is not encoded by any of the F-designated genes set forth in Table 1.

21. An isolated polypeptide comprising a naturally occurring allelic variant of a polypeptide comprising an amino acid sequence selected from the group consisting of those sequences set forth in Appendix B, or a portion thereof, provided that the amino acid sequence is not encoded by any of the F-designated genes set forth in Table 1.

22. The isolated polypeptide of claim 18, further comprising heterologous amino acid sequences.

23. An isolated polypeptide which is encoded by a nucleic acid molecule comprising a nucleotide sequence which is at least 50% homologous to a nucleic acid selected from the group consisting of those sequences set forth in Appendix A, provided that the nucleic acid molecule does not consist of any of the F-designated nucleic acid molecules set forth in Table 1.

24. An isolated polypeptide comprising an amino acid sequence which is at least 50% homologous to an amino acid sequence selected from the group consisting of those sequences set forth in Appendix B, provided that the amino acid sequence is not encoded by any of the F-designated genes set forth in Table 1.

25. A method for producing a fine chemical, comprising culturing a cell containing a vector of claim 12 such that the fine chemical is produced.

26. The method of claim 25, wherein said method further comprises the step of recovering the fine chemical from said culture.

27. The method of claim 25, wherein said method further comprises the step of transfecting said cell with the vector of claim 11 to result in a cell containing said vector.

28. The method of claim 25, wherein said cell belongs to the genus Corynebacterium or Brevibacterium.

29. The method of claim 25, wherein said cell is selected from the group consisting of: Corynebacterium glutamicum, Corynebacterium herculis, Corynebacterium, lilium, Corynebacterium acetoacidophilum, Corynebacterium acetoglutamicum, Corynebacterium acetophilum, Corynebacterium amnmoniagenes, Corynebacterium fujiokense, Corynebacterium nitrilophilus, Brevibacterium ammoniagenes, Brevibacterium butanicum, Brevibacterium divaricatum, Brevibacteriumflavum, Brevibacterium healii, Brevibacterium ketoglutamicum, Brevibacterium ketosoreductum, Brevibacterium lactofermentum, Brevibacterium linens, Brevibacterium paraffinolyticum, and those strains set forth in Table 3.

30. The method of claim 25, wherein expression of the nucleic acid molecule from said vector results in modulation of production of said fine chemical.

31. The method of claim 25, wherein said fine chemical is selected from the group consisting of: organic acids, proteinogenic and nonproteinogenic amino acids, purine and pyrimidine bases, nucleosides, nucleotides, lipids, saturated and unsaturated fatty acids, diols, carbohydrates, aromatic compounds, vitamins, cofactors, polyketides, and enzymes.

32. The method of claim 25, wherein said fine chemical is an amino acid.

33. The method of claim 32, wherein said amino acid is drawn from the group consisting of: lysine, glutamate, glutamine, alanine, aspartate, glycine, serine, threonine, methionine, cysteine, valine, leucine, isoleucine, arginine, proline, histidine, tyrosine, phenylalanine, and tryptophan.

34. A method for producing a fine chemical, comprising culturing a cell whose genomic DNA has been altered by the inclusion of a nucleic acid molecule of any one of claims 1-9.

35. A method for diagnosing the presence or activity of Corynebacterium diphtheriae in a subject, comprising detecting the presence of one or more of the sequences set forth in Appendix A or Appendix B in the subject, provided that the sequences are not or are not encoded by any of the F-designated sequences set forth in Table 1, thereby diagnosing the presence or activity of Corynebacterium diphtheriae in the subject.

36. A host cell comprising a nucleic acid molecule selected from the group consisting of the nucleic acid molecules set forth in Appendix A, wherein the nucleic acid molecule is disrupted.

37. A host cell comprising a nucleic acid molecule selected from the group consisting of the nucleic acid molecules set forth in Appendix A, wherein the nucleic acid molecule comprises one or more nucleic acid modifications from the sequence set forth in Appendix A.

38. A host cell comprising a nucleic acid molecule selected from the group consisting of the nucleic acid molecules set forth in Appendix A, wherein the regulatory region of the nucleic acid molecule is modified relative to the wild-type regulatory region of the molecule.
